(19) United States
(12) Patent Application Publication
(10) Pub. No.: US 2022/0289795 A1
(43) Pub. Date: Sep. 15, 2022

(54) EFFICIENT METHOD FOR PREPARING PPR PROTEIN AND USE OF THE SAME

(71) Applicants: EditForce, Inc., Fukuoka-shi, Fukuoka (JP); KYUSHU UNIVERSITY, NATIONAL UNIVERSITY CORPORATION, Fukuoka-shi, Fukuoka (JP)

(72) Inventors: Yusuke Yagi, Fukuoka-shi (JP); Takahiro Nakamura, Fukuoka-shi (JP)

(73) Assignees: EditForce, Inc., Fukuoka-shi, Fukuoka (JP); KYUSHU UNIVERSITY, NATIONAL UNIVERSITY CORPORATION, Fukuoka-shi, Fukuoka (JP)

(21) Appl. No.: 17/614,231

(22) PCT Filed: May 29, 2020
(86) PCT No.: PCT/JP2020/021472

§ 371 Date: Nov. 24, 2021

(30) Foreign Application Priority Data
May 29, 2019 (JP) 2019-100551

(51) Int. Cl. C07K 14/00; G01N 33/53; C12N 15/113

(52) U.S. Cl. CPC C07K 14/00; G01N 33/5308; C12N 15/113; C07K 2319/85; C07K 2319/09; C07K 2319/60

(57) ABSTRACT

A PPR protein with high performance is provided. A PPR protein that binds to a long nucleotide sequence is provided by linking motifs in a number larger than conventionally used 7 to 14. A PPR motif is provided, of which typical examples are the followings: (A-1) a PPR motif consisting of the sequence of SEQ ID NO: 9 or 401, (C-1) a PPR motif consisting of the sequence of SEQ ID NO: 10, (G-1) a PPR motif consisting of the sequence of SEQ ID NO: 11, and (U-1) a PPR motif consisting of the sequence of SEQ ID NO: 12. These motifs are useful as PPR motifs for adenine, cytosine, guanine, and uracil in a target nucleotide sequence, respectively.

[0001] The present invention relates to a nucleic acid manipulation technique using a protein capable of binding to a target nucleic acid. The present invention is useful in a wide range of fields, including medicine (drug discovery support, therapeutic treatment etc.), agriculture (agricultural, fishery and livestock production, breeding etc.), and chemistry (biological material production etc.).

[0002] The sequence listing that is contained in the file named “P211026US00_Replacement_Sequence_Listing_4-20-2022.txt”, which is 1095 KB and was created on Apr. 15, 2022, is incorporated herein by reference in its entirety.

### TECHNICAL FIELD

### Background Techniques

[0003] PPR proteins are proteins comprising repeat of PPR motifs each having about 35 amino acids length, and one PPR motif can specifically bind to one base. The combination of the first, fourth, and ii-th (second from the end before the next motif) amino acids in a PPR motif determines to which one of adenine, cytosine, guanine, and uracil (or thymine) the motif binds (Patent documents 1 and 2).

[0004] Since the PPR motifs attain the binding by recognizing a single base with one motif, when designing, for example, a PPR protein that specifically binds to an 18-base long nucleic acid sequence, 18 PPR motifs should be linked together. So far, artificial PPR proteins comprising 7 to 14 PPR motifs linked together have been reported (Non-patent documents 1 to 6).

### PRIOR ART REFERENCES

### Patent Documents

[0005] Patent document 1: International Publication WO2013/058404
[0006] Patent document 2: International Publication WO2014/175284

### Non-Patent Documents

[0007] Non-patent document 1: Coquille, S. et al., An artificial PPR scaffold for programmable RNA recognition, Nature Communications 5, Article number: 5729 (2014)
[0008] Non-patent document 2: Shen, C. et al., Specific RNA Recognition by Designer Pentatricopeptide Repeat Protein, Molecular Plant 8, 667-670 (2015)
[0009] Non-patent document 3: Shen, C. et al., Structural basis for specific single-stranded RNA recognition by designer pentatricopeptide repeat proteins, Nature Communications, Volume 7, Article number: 11285 (2016)
[0010] Non-patent document 4: Gully, B. S. et al., The design and structural characterization of a synthetic pentatricopeptide repeat protein, Acta Cryst., D71, 196-208 (2015)
[0011] Non-patent document 5: Miranda, R. G. et al., RNA-binding specificity landscapes of designer pentatricopeptide repeat proteins elucidate principles of PPR-RNA interactions, Nucleic Acids Research, 46(5), 2613-2623 (2018)
[0012] Non-patent document 6: Yan, J. et al., Delineation of pentatricopeptide repeat codes for target RNA prediction, Nucleic Acids Research, gkz075 (2019)

### SUMMARY OF THE INVENTION

### Object to be Achieved by the Invention

[0013] High performance PPR proteins are required in order that the PPR proteins specifically bind to a target RNA molecule in cells, and manipulations can be performed with them as wanted.

[0014] In addition, in order that the PPR proteins specifically bind to a target RNA molecule in cells, and manipulations can be performed with them as wanted, PPR proteins that comprise linked motifs more than 7 to 14 conventionally used and can bind to longer sequences are required. For example, the human genomes comprise 6 billion base pairs constituted by the four kinds of bases (A, C, G, and T or U), and therefore a sequence of at least 17 nucleotides is required to specify a single nucleotide sequence from the sequences of the genomes (this is because 4¹⁶ is 4 billions, and 4¹⁷ is 16 billions).

### Means for Achieving the Object

[0015] The present invention provides the followings as novel PPR motifs and so forth.

[1] A PPR motif, which is any one of the following PPR motifs:
(A-1) a PPR motif consisting of the sequence of SEQ ID NO: 9, or a PPR motif consisting of the sequence of SEQ ID NO: 9 having a substitution selected from the group consisting of substitution of the amino acid at position 10 with tyrosine, substitution of the amino acid at position 15 with lysine, substitution of the amino acid at position 16 with leucine, substitution of the amino acid at position 17 with glutamic acid, substitution of the amino acid at position 18 with aspartic acid, and substitution of the amino acid at position 28 with glutamic acid, or a PPR motif consisting of the sequence of SEQ ID NO: 401 or a PPR motif consisting of the sequence of SEQ ID NO: 401 having a substitution selected from the group consisting of substitution of the amino acid at position 10 with tyrosine, substitution of the amino acid at position 16 with leucine, substitution of the amino acid at position 17 with glutamic acid, substitution of the amino acid at position 18 with aspartic acid, and substitution of the amino acid at position 28 with glutamic acid;
(A-2) a PPR motif consisting of the sequence of SEQ ID NO: 9 or 401 having a substitution, deletion, or addition of 1 to 20 amino acids other than the amino acids at positions 1, 2, 3, 4, 6, 7, 9, 11, 12, 14, 19, 26, 30, 33, and 34, and having an adenine-binding property;
(A-3) a PPR motif having a sequence identity of at least 42% to the sequence of SEQ ID NO: 9 or 401, provided that the amino acids at positions 1, 2, 3, 4, 6, 7, 9, 11, 12, 14, 19, 26, 30, 33, and 34 are identical, and having an adenine-binding property;
(C-1) a PPR motif consisting of the sequence of SEQ ID NO: 10, or a PPR motif consisting of the sequence of SEQ ID NO: 10 having a substitution of amino acid selected from the group consisting of substitution of the amino acid at position 2 with serine, substitution of the amino acid at position 5 with isoleucine, substitution of the amino acid at position 7 with leucine, substitution of the amino acid at position 8 with lysine, substitution of the amino acid at position 10 with phenylalanine or tyrosine, substitution of the amino acid at position 15 with arginine, substitution of the amino acid at position 22 with valine, substitution of the amino acid at position 24 with arginine, substitution of the amino acid at position 27 with leucine, and substitution of the amino acid at position 29 with arginine;
(C-2) a PPR motif consisting of the sequence of SEQ ID NO: 10 having a substitution, deletion, or addition of 1 to 25 amino acids other than the amino acids at positions 1, 3, 4, 14, 18, 19, 26, 30, 33, and 34, and having a cytosine-binding property;
(C-3) a PPR motif having a sequence identity of at least 25% to the sequence of SEQ ID NO: 10, provided that the amino acids at positions 1, 3, 4, 14, 18, 19, 26, 30, 33, and 34 are identical, and having a cytosine-binding property;
(G-1) a PPR motif consisting of the sequence of SEQ ID NO: 11, or a PPR motif consisting of the sequence of SEQ ID NO: 11 having a substitution selected from the group consisting of substitution of the amino acid at position 10 with phenylalanine, substitution of the amino acid at position 15 with aspartic acid, substitution of the amino acid at position 27 with valine, substitution of the amino acid at position 28 with serine, and substitution of the amino acid at position 35 with isoleucine;
(G-2) a PPR motif consisting of the sequence of SEQ ID NO: 11 having a substitution, deletion, or addition of 1 to 21 amino acids other than the amino acids at positions 1, 2, 3, 4, 6, 7, 9, 14, 18, 19, 26, 30, 33, and 34, and having a guanine-binding property;
(G-3) a PPR motif having a sequence identity of at least 40% to the sequence of SEQ ID NO: 11, provided that the amino acids at positions 1, 2, 3, 4, 6, 7, 9, 14, 18, 19, 26, 30, 33, and 34 are identical, and having a guanine-binding property;
(U-1) a PPR motif consisting of the sequence of SEQ ID NO: 12, or a PPR motif consisting of the sequence of SEQ ID NO: 12 having a substitution selected from the group consisting of substitution of the amino acid at position 10 with phenylalanine, substitution of the amino acid at position 13 with serine, substitution of the amino acid at position 15 with lysine, substitution of the amino acid at position 17 with glutamic acid, substitution of the amino acid at position 20 with leucine, substitution of the amino acid at position 21 with lysine, substitution of the amino acid at position 23 with phenylalanine, substitution of the amino acid at position 24 with aspartic acid, substitution of the amino acid at position 27 with lysine, substitution of the amino acid at position 28 with lysine, substitution of the amino acid at position 29 with arginine, and substitution of the amino acid at position 31 with leucine;
(U-2) a PPR motif consisting of the sequence of SEQ ID NO: 12 having a substitution, deletion, or addition of 1 to 22 amino acids other than the amino acids at positions 1, 2, 3, 4, 6, 11, 12, 14, 19, 26, 30, 33, and 34, and having a uracil-binding property; and
(U-3) a PPR motif having a sequence identity of at least 37% to the sequence of SEQ ID NO: 12, provided that the amino acids at positions 1, 2, 3, 4, 6, 11, 12, 14, 19, 26, 30, 33, and 34 are identical, and having a uracil-binding property.
[2] Use of the PPR motif according to 1 for preparation of a PPR protein of which target RNA has a length of 15 bases or longer.
[3] Use of the PPR motif according to 1 for preparation of a PPR protein, which is for enhancing binding performance of the PPR protein to a target RNA.
[4] A PPR protein comprising n of PPR motifs and capable of binding to a target RNA consisting of a sequence of n bases in length, wherein:

[0016] the PPR motif for adenine in the base sequence is the PPR motif of (A-1), (A-2), or (A-3) defined in 1;

[0017] the PPR motif for cytosine in the base sequence is the PPR motif of (C-1), (C-2), or (c-3) defined in 1;

[0018] the PPR motif for guanine in the base sequence is the PPR motif of (G-1), (G-2), or (G-3) defined in 1; and

[0019] the PPR motif for uracil in the base sequence is the PPR motif of (U-1), (U-2), or (U-3) defined in 1.

[5] The protein according to 4, wherein n is 15 or larger.
[6] The protein according to 4 or 5, wherein the first PPR motif from the N-terminus is any one of the following motifs:
(1st_A-1) a PPR motif consisting of the sequence of SEQ ID NO: 402 having such substitutions of the amino acids at positions 6 and 9 that any one of the combinations defined below is satisfied;
(1st_A-2) a PPR motif consisting of the sequence of (1st_A-1) having a substitution, deletion, or addition of 1 to 9 amino acids other than the amino acids at positions 1, 4, 6, 9, and 34, and having an adenine-binding property;
(1st_A-3) a PPR motif having a sequence identity of at least 80% to the sequence of
(1st_A-1), provided that the amino acids at positions 1, 4, 6, 9, and 34 are identical, and having an adenine-binding property;
(1st_C-1) a PPR motif consisting of the sequence of SEQ ID NO: 403;
(1st_C-2) a PPR motif comprising the sequence of (1st_C-1) having a substitution, deletion, or addition of 1 to 9 amino acids other than the amino acids at positions 1, 4, 6, 9, and 34, and having a cytosine-binding property;
(1st_C-3) a PPR motif having a sequence identity of at least 80% to the sequence of
(1st_C-1), provided that the amino acids at positions 1, 4, 6, 9, and 34 are identical, and having a cytosine binding property;
(1st_G-1) a PPR motif consisting of the sequence of SEQ ID NO: 404 having such substitutions of the amino acids at positions 6 and 9 that any one of the combinations defined below is satisfied;
(1st_G-2) a PPR motif comprising the sequence of (1st_G-1) having a substitution, deletion, or addition of 1 to 9 amino acids other than the amino acids at positions 1, 4, 6, 9, and 34, and having a guanine-binding property;
(1st_G-3) a PPR motif having a sequence identity of at least 80% to the sequence of
(1st_G-1), provided that the amino acids at positions 1, 4, 6, 9, and 34 are identical, and having a guanine-binding property;
(1st_U-1) a PPR motif consisting of the sequence of SEQ ID NO: 405 having such substitutions of the amino acids at positions 6 and 9 that any one of the combinations defined below is satisfied;
(1st_U-2) a PPR motif comprising the sequence of (1st_U-1) having a substitution, deletion, or addition of 1 to 9 amino acids other than the amino acids at positions 1, 4, 6, 9, and 34, and having a uracil-binding property; and
(1st_U-3) a PPR motif having a sequence identity of at least 80% to the sequence of
(1st_U-1), provided that the amino acids at positions 1, 4, 6, 9, and 34 are identical, and having a uracil-binding property:
[0020] a combination of asparagine as the amino acid at position 6 and glutamic acid as the amino acid at position 9,
[0021] a combination of asparagine as the amino acid at position 6 and glutamine as the amino acid at position 9,
[0022] a combination of asparagine as the amino acid at position 6 and lysine as the amino acid at position 9, and
[0023] a combination of aspartic acid as the amino acid at position 6 and glycine as the amino acid at position 9.
   [7] A method for controlling RNA splicing, which uses the protein according to any one of 4 to 6.
   [8] A method for detecting RNA, which uses the protein according to any one of 4 to 6.
   [9] A fusion protein of at least one selected from the group consisting of a fluorescent protein, a nuclear localization signal peptide, and a tag protein, and the protein according to any one of 4 to 6.
   [10] A nucleic acid encoding the PPR motif according to 1, or the protein according to any one of 4 to 6.
   [11] A vector comprising the nucleic acid according to 10.
   [12] A cell (except for human individual) containing the vector according to 11.
   [13] A method for manipulating RNA, which uses the PPR motif according to 1, the protein according to any one of 4 to 6, or the vector according to 11 (implementation in human individual is excluded).
   [14] A method for producing an organism, which comprises the manipulation method according to 13.
   [1] A PPR motif, which is any one of the following PPR motifs:
   (A-1) a PPR motif consisting of the sequence of SEQ ID NO: 9, or a PPR motif consisting of the sequence of SEQ ID NO: 9 having a substitution selected from the group consisting of substitution of the amino acid at position 10 with tyrosine, substitution of the amino acid at position 15 with lysine, substitution of the amino acid at position 16 with leucine, substitution of the amino acid at position 17 with glutamic acid, substitution of the amino acid at position 18 with aspartic acid, and a substitution of the amino acid at position 28 with glutamic acid;
   (A-2) a PPR motif consisting of the sequence of SEQ ID NO: 9 having a substitution, deletion, or addition of 1 to 20 amino acids other than the amino acids at positions 1, 2, 3, 4, 6, 7, 9, 11, 12, 14, 19, 26, 30, 33, and 34, and having an adenine-binding property;
   (A-3) a PPR motif having a sequence identity of at least 42% to the sequence of SEQ ID NO: 9, provided that the amino acids at positions 1, 2, 3, 4, 6, 7, 9, 11, 12, 14, 19, 26, 30, 33, and 34 are identical, and having an adenine-binding property;
   (C-1) a PPR motif consisting of the sequence of SEQ ID NO: 10, or a PPR motif consisting of the sequence of SEQ ID NO: 10 having a substitution of amino acid selected from the group consisting of substitution of the amino acid at position 2 with serine, substitution of the amino acid at position 5 with isoleucine, substitution of the amino acid at position 7 with leucine, substitution of the amino acid at position 8 with lysine, substitution of the amino acid at position 10 with phenylalanine or tyrosine, substitution of the amino acid at position 15 with arginine, substitution of the amino acid at position 22 with valine, substitution of the amino acid at position 24 with arginine, substitution of the amino acid at position 27 with leucine, and substitution of the amino acid at position 29 with arginine;
   (C-2) a PPR motif consisting of the sequence of SEQ ID NO: 10 having a substitution, deletion, or addition of 1 to 25 amino acids other than the amino acids at positions 1, 3, 4, 14, 18, 19, 26, 30, 33, and 34, and having a cytosine-binding property;
   (C-3) a PPR motif having a sequence identity of at least 25% to the sequence of SEQ ID NO: 10, provided that the amino acids at positions 1, 3, 4, 14, 18, 19, 26, 30, 33, and 34 are identical, and having a cytosine-binding property;
   (G-1) a PPR motif consisting of the sequence of SEQ ID NO: 11, or a PPR motif consisting of the sequence of SEQ ID NO: 11 having a substitution selected from the group consisting of substitution of the amino acid at position 10 with phenylalanine, substitution of the amino acid at position 15 with aspartic acid, substitution of the amino acid at position 27 with valine, substitution of the amino acid at position 28 with serine, and substitution of the amino acid at position 35 with isoleucine;
   (G-2) a PPR motif consisting of the sequence of SEQ ID NO: 11 having a substitution, deletion, or addition of 1 to 21 amino acids other than the amino acids at positions 1, 2, 3, 4, 6, 7, 9, 14, 18, 19, 26, 30, 33, and 34, and having a guanine-binding property;
   (G-3) a PPR motif having a sequence identity of at least 40% to the sequence of SEQ ID NO: 11, provided that the amino acids at positions 1, 2, 3, 4, 6, 7, 9, 14, 18, 19, 26, 30, 33, and 34 are identical, and having a guanine-binding property;
   (U-1) a PPR motif consisting of the sequence of SEQ ID NO: 12, or a PPR motif consisting of the sequence of SEQ ID NO: 12 having a substitution selected from the group consisting of substitution of the amino acid at position 10 with phenylalanine, substitution of the amino acid at position 13 with serine, substitution of the amino acid at position 15 with lysine, substitution of the amino acid at position 17 with glutamic acid, substitution of the amino acid at position 20 with leucine, substitution of the amino acid at position 21 with lysine, substitution of the amino acid at position 23 with phenylalanine, substitution of the amino acid at position 24 with aspartic acid, substitution of the amino acid at position 27 with lysine, substitution of the amino acid at position 28 with lysine, substitution of the amino acid at position 29 with arginine, and substitution of the amino acid at position 31 with leucine;
   (U-2) a PPR motif consisting of the sequence of SEQ ID NO: 12 having a substitution, deletion, or addition of 1 to 22 amino acids other than the amino acids at positions 1, 2, 3, 4, 6, 11, 12, 14, 19, 26, 30, 33, and 34, and having a uracil-binding property; and
   (U-3) a PPR motif having a sequence identity of at least 37% to the sequence of SEQ ID NO: 12, provided that the amino acids at positions 1, 2, 3, 4, 6, 11, 12, 14, 19, 26, 30, 33, and 34 are identical, and having a uracil-binding property.
   [2] Use of the PPR motif according to 1 for preparation of a PPR protein of which target RNA has a length of 15 bases or longer.
   [3] Use of the PPR motif according to 1 for preparation of a PPR protein, which is for enhancing binding performance of the PPR protein to a target RNA.
   [4] A protein comprising n of PPR motifs and capable of binding to a target RNA consisting of a sequence of n bases in length, wherein:

[0024] the PPR motif for adenine in the base sequence is the PPR motif of (A-1), (A-2), or (A-3) defined in 1;

[0025] the PPR motif for cytosine in the base sequence is the PPR motif of (C-1), (C-2), or (c-3) defined in 1;

[0026] the PPR motif for guanine in the base sequence is the PPR motif of (G-1), (G-2), or (G-3) defined in 1; and

[0027] the PPR motif for uracil in the base sequence is the PPR motif of (U-1), (U-2), or (U-3) defined in 1.

[5] The protein according to 4, wherein n is 15 or larger.
[6] A method for controlling RNA splicing, which uses the protein according to 4 or 5.
[7] A method for detecting RNA, which uses the protein according to 4 or 5.
[8] A fusion protein of at least one selected from the group consisting of a fluorescent protein, a nuclear localization signal peptide, and a tag protein, and the protein according to 4 or 5.
[9] A nucleic acid encoding the PPR motif according to 1, or the protein according to 4 or 5.
[10] A vector comprising the nucleic acid according to 9.
[11] A cell (except for human individual) containing the vector according to 10.
[12] A method for manipulating RNA, which uses the PPR motif according to 1, the protein according to 4 or 5, or the vector according to 10 (implementation in human individual is excluded).
[13] A method for producing an organism, which comprises the manipulation method according to 12.
[14] A method for preparing a gene encoding a protein comprising n of PPR motifs that can bind to a target nucleic acid consisting of a sequence of n bases in length, which comprises the following steps:

[0028] selecting m kinds of PPR parts required to prepare the objective gene from a library of at least 20×m kinds of PPR parts, which consist of at least m kinds of intermediate vectors Dest-a, . . . , which are designed so that they can successively linked, and are each inserted with at least 20 kinds of polynucleotides including 4 kinds encoding PPR motifs that have adenine, cytosine-, guanine-, and uracil- or thymine-binding properties, respectively, and 16 kinds encoding linkage products of two of the PPR motifs, respectively; and

[0029] subjecting the selected m kinds of PPR parts to the Golden Gate reaction together with vector parts to obtain a vector in which m of polynucleotide linkage products are inserted (where n is m or larger, and is m×2 or smaller).

[15] The preparation method according to 14, wherein m is 10, and which is for preparing a gene encoding a protein containing 15 or more of PPR motifs.
[16] A method for detecting or quantifying a protein comprising n of PPR motifs that can bind to a target nucleic acid consisting of a sequence of n bases in length, which comprises the following step:

[0030] the step of adding a solution containing a candidate protein to a solid-phased target nucleic acid, and detecting or quantifying the protein that bound to the target nucleic acid.

[17] The method according to 16, wherein the candidate protein is fused to a marker protein.

### BRIEF DESCRIPTION OF THE DRAWINGS

[0031] FIG. 1 v2 Motif (that recognizes adenine)

[0032] FIG. 2 v2 Motif (that recognizes cytosine)

[0033] FIG. 3 v2 Motif (that recognizes guanine)

[0034] FIG. 4 v2 Motif (that recognizes uracil)

[0035] FIG. 5 An example of the cloning method for seamlessly linking PPR motif sequences.

[0036] FIG. 6 Verification of seamless cloning using libraries of PPR motifs comprising 1 or 2 motifs. A: The amino acid sequences of v1, v2, v3.1, and v3.2 motifs. v3.1 corresponds to v2 introduced with a DISK mutation in the adenine recognition motif. For v3.2 motif, 1st_x is chosen for the first motif, and the second and following motifs are selected from v2_C, v2_G, v2_U, and v3.1_A. B: The results of the preparation of three clones for each of the three kinds of 18-motif PPR proteins. With v1, correct size bands were obtained except for the second clone of PPR2. With v2, correct size bands were obtained for all clones.

[0037] FIG. 7 An example of high throughput evaluation of binding performance of RNA-binding proteins. A: Comparison of typical nucleic acid-protein binding experiment schemes. B: Outline of RPB-ELISA (RNA-protein binding ELISA). C: Experimental results obtained with MS2 protein and a target RNA thereof. Specific bindings were detected with both the purified protein solution (Purified protein) and E. coli lysate (Lysate).

[0038] FIG. 8 The results of RNA binding performance comparison experiments. When the proteins were prepared with the motif sequence v2, there was observed increase (1.3 to 3.6-fold) in the binding power to the target sequence for all the proteins compared with the proteins prepared with the motif sequence v1. In addition, higher target binding signal/non-target binding signal (S/N) was obtained with v2 for all the proteins compared with the proteins obtained with v1, indicating that v2 provides higher affinity and specificity for the target compared with v1. In the upper left graph (Binding signal (L.U./10⁷ CPS)), black bars show the results for RNA probes having target sequences, gray bars show the results for RNA probes having Off target 1, and white bars show the results for RNA probes having Off target 2. In the probe sequences (Prob seq.) shown in the lower left part, the underlines indicate the target sequences (Target seq.).

[0039] FIG. 9 Detailed analysis of RNA binding performance (specificity) of the PPR proteins. PPR proteins for 23 kinds of target sequences were prepared by using the v2 motif, and all binding combinations were analyzed by using RPB-ELISA. It was found that 21 kinds of PPR proteins showed the strongest binding power to their targets (upper part). Similarly, the RNA binding performance was analyzed by using the V3.1 motif (lower part).

[0040] FIG. 10 Detailed analysis of RNA binding performance (affinity) of the PPR proteins. A: Kd values of the prepared proteins for their targets. The minimum value was 1.95×10⁻⁹, which is the lowest Kd value among those of the designed PPR proteins reported so far. B: Correlation between the Kd value and the signal value obtained from the binding experiment using RPB-ELISA. It can be estimated that when the luminescence value observed in RPB-ELISA is 1.0 to 2.0×10⁷, the Kd value is 10⁻⁶ to 10⁻⁷ M; when the luminescence value observed in RPB-ELISA is 2.0 to 4.0×10⁷, the Kd value is 10⁻⁷ to 10⁻⁸ M; and when the luminescence value observed in RPB-ELISA is higher than 4.0×10⁷, the Kd value is ˜10⁻⁸ or lower.

[0041] FIG. 11 Successful construction probability. PPR proteins for 72 kinds of target sequences were prepared by using the v2 motif, and probability of successful construction was calculated by using RPB-ELISA. Among the 72 kinds of the PPR proteins, 63 kinds (88%) were estimated to have a Kd value of 10⁻⁸ M or lower (RPB-ELISA value is higher than 1×10⁷). Further, 54 (75%) of them had a specificity value (S/N) higher than 10, which value is for evaluation of the specificity, and is calculated by dividing the target binding signal with the non-target binding signal. These results indicate that by preparing the PPR protein using the v2 motif, sequence-specific RNA-binding proteins can be efficiently prepared.

[0042] FIG. 12 Evaluation of target binding activity in relation with the number of PPR motifs. A: Results for the respective target sequences. B: Averages of the values for those of 18, 15, and 12 motifs. It was found that a larger number of motifs provides higher binding strength, and when those of 18 motifs and 15 motifs are compared, a protein with high binding strength can be stably prepared with 18 motifs.

[0043] FIG. 13 An example of artificial control of splicing with PPR proteins. A: Experimental scheme. Sequences of 18 nucleotides were chosen from the regions of intron 1, exon 2, and intron 2, and an experiment was performed for determining whether the amount ratio of the splicing variants of the RG-6 reporter could be changed depending on the PPR proteins binding to the sequences. B: GFP and RFP fluorescence images of cells obtained after cultured with the PPR expression plasmid DNA and RG-6 reporter plasmid DNA. C: Splicing variant ratio. Total RNA was extracted from the cells after the fluorescence images were taken, and the amplification products of RT-PCR were electrophoresed. Intensities of the band of about 114 bp, which was regarded as band of PCR product (a) obtained with exon skipping, and the band of about 142 bp, which was regarded as band of PCR product (b) obtained without skipping, were measured. The splicing ratio was calculated as a/(a+b). It was found that the splicing ratio was significantly changed by introduction of PPR. It was verified that exon skipping can be changed by using the PPR proteins, and in addition, it was found that splicing can be more efficiently changed by using the v2 motif.

[0044] FIG. 14 Effect of the first PPR motif from the N-terminus on aggregation. Each PPR protein was prepared in an Escherichia coli (E. coli) expression system, purified, and separated by gel filtration chromatography. A smaller volume of the elution fraction (Elution vol.) indicates a larger molecular size. Those using v2 were eluted in elution fractions of 8 to 10 mL, while the elution peak was observed for elution fractions of 12 to 14 mL with v3.2. This suggested a possibility of aggregation of the proteins due to the larger protein size obtained with v2, and it was found that the aggregation was improved with v3.2.

### MODES FOR CARRYING OUT THE INVENTION

### [PPR Motif and PPR Protein]

### (Definition)

[0045] The PPR motif referred to in the present invention means a polypeptide constituted by 30 to 38 amino acids and having an amino acid sequence of an E value not larger than a predetermined value (desirably E-03) obtained for PF01535 in Pfam or PS51375 in Prosite as determined by amino acid sequence analysis with a protein domain search program on the Web, unless especially stated. The position numbers of amino acids constituting the PPR motif defined in the present invention are substantially synonymous with those of PF01535, and they correspond to those obtained by subtracting 2 from the numbers of the amino acid positions of PS51375 (for example, the position 1 referred to in the present invention corresponds to the position 3 of PS51375). Further, the term “ii” (−2)-th amino acid means the second amino acid from the end (C-terminus side) of the amino acids constituting the PPR motif, or the second amino acid towards the N-terminus side from the first amino acid of the following PPR motif, i.e., −2nd amino acid. When the following PPR motif is not definitely identified, the amino acid 2 amino acids before the first amino acid of the following helical structure is the amino acid of “ii”. For Pfam, http://pfam.sanger.ac.uk/ can be referred to, and for Prosite, http://www.expasy.org/prosite/ can be referred to.

[0046] Although the conservativeness of the conserved amino acid sequence of the PPR motif is low at the amino acid level, two of the a-helixes as the secondary structure are well conserved. Although a typical PPR motif is constituted by 35 amino acids, the length thereof is as variable as is from 30 to 38 amino acids.

[0047] More specifically, the PPR motif referred to in the present invention consists of a polypeptide of a 30- to 38-amino acid length represented by the formula 1.

[Formula 1]

(Helix A)-X-(Helix B)-L (Formula 1)

[0048] In the formula:

[0049] Helix A is a moiety of 12-amino acid length capable of forming an a-helix structure, and is represented by the formula 2;

[Formula 2]

A₁-A₂-A₃-A₄-A₅-A₆-A₇-A₈-A₉-A₁₀-A₁₁-A₁₂ (Formula 2)

[0050] wherein, in the formula 2, A₁ to A₁₂ independently represent an amino acid;

[0051] X does not exist, or is a moiety of 1- to 9-amino acid length;

[0052] Helix B is a moiety of 11- to 13-amino acid length capable of forming an a-helix structure; and

[0053] L is a moiety of 2- to 7-amino acid length represented by the formula 3;

[Formula 3]

Lᵥᵢᵢ-Lᵥᵢ-Lᵥ-Lᵢᵥ-Lᵢᵢᵢ-Lᵢᵢ-Lᵢ (Formula 3)

[0054] wherein, in the formula 3, the amino acids are numbered “i” (−1), “ii” (−2), and so on from the C-terminus side,

[0055] provided that Lᵢᵢᵢ to Lᵥᵢᵢ may not exist.

[0056] The term PPR protein used in the present invention refers to a PPR protein comprising one or more, preferably two or more, of the above-mentioned PPR motifs, unless especially indicated. The term protein used in this description refers to any substance consisting of a polypeptide (chain consisting of a plurality of amino acids bound via peptide bonds), unless especially indicated, and includes those consisting of a polypeptide of a comparatively low molecular weight. The term amino acid used in the present invention refers to a usual amino acid molecule, and also refers to an amino acid residue constituting a peptide chain. Which one is referred to shall be clear to those skilled in the art from the context.

[0057] In the present invention, the term specificity/specific used for the binding property of the PPR motif to a base in the target nucleic acid means that the binding activity to any one of the four bases is higher than the binding activities to the other bases, unless especially stated.

[0058] In the present invention, the term nucleic acid refers to RNA or DNA. Although the PPR protein may have specificity for bases in RNA or DNA, it does not bind to nucleic acid monomers.

[0059] In the PPR motif, combination of three of the 1st, 4th, and ii-th amino acids is important for specific binding to a base, and to which base the motif binds can be determined according to this combination (Patent document 1 and 2 mentioned above).

[0060] Specifically, with respect to the RNA-binding PPR motifs, the relationship between the combinations of three of the 1st, 4th, and ii-th amino acids and the bases to which they can bind is as follows (see Patent document 1 mentioned above).

(3-1) When the combination of the three amino acids of A₁, A4, and Lᵢᵢ consists of valine, asparagine, and aspartic acid in this order, the PPR motif has such a selective RNA base-binding ability that the motif strongly binds to U, less strongly to C, and still less strongly to A or G.
(3-2) When the combination of the three amino acids of A₁, A4, and Lᵢᵢ consists of valine, threonine, and asparagine in this order, the PPR motif has such a selective RNA base-binding ability that the motif strongly binds to A, less strongly to G, and still less strongly to C, but dose not bind to U.
(3-3) When the combination of the three amino acids of A₁, A4, and Lᵢᵢ consists of valine, asparagine, and asparagine in this order, the PPR motif has such a selective RNA base-binding ability that the motif strongly binds to C, and less strongly to A or U, but does not bind to G.
(3-4) When the combination of the three amino acids of A₁, A₄, and Lᵢᵢ consists of glutamic acid, glycine, and aspartic acid in this order, the PPR motif has such a selective RNA base-binding ability that the motif strongly binds to G, but does not bind to A, U, and C.
(3-5) When the combination of the three amino acids of A₁, A₄, and Lᵢᵢ consists of isoleucine, asparagine, and asparagine in this order, the PPR motif has such a selective RNA base-binding ability that the motif strongly binds to C, less strongly to U, and still less strongly to A, but does not bind to G.
(3-6) When the combination of the three amino acids of A₁, A₄, and Lᵢᵢ consists of valine, threonine, and aspartic acid in this order, the PPR motif has such a selective RNA base-binding ability that the motif strongly binds to G, and less strongly to U, but does not bind to A and C.
(3-7) When the combination of the three amino acids of A₁, A₄, and Lᵢᵢ consists of lysine, threonine, and aspartic acid in this order, the PPR motif has such a selective RNA base-binding ability that the motif strongly binds to G, and less strongly to A, but does not bind to U and C.
(3-8) When the combination of the three amino acids of A₁, A₄, and Lᵢᵢ consists of phenylalanine, serine, and asparagine in this order, the PPR motif has such a selective RNA base-binding ability that the motif strongly binds to A, less strongly to C, and still less strongly to G and U.
(3-9) When the combination of the three amino acids of A₁, A₄, and Lᵢᵢ consists of valine, asparagine, and serine in this order, the PPR motif has such a selective RNA base-binding ability that the motif strongly binds to C, and less strongly to U, but does not bind to A and G.
(3-10) When the combination of the three amino acids of A₁, A₄, and Lᵢᵢ consists of phenylalanine, threonine, and asparagine in this order, the PPR motif has such a selective RNA base-binding ability that the motif strongly binds to A, but does not bind to G, U, and C.
(3-11) When the combination of the three amino acids of A₁, A₄, and Lᵢᵢ consists of isoleucine, asparagine, and aspartic acid in this order, the PPR motif has such a selective RNA base-binding ability that the motif strongly binds to U, and less strongly to A, but does not bind to G and C.
(3-12) When the combination of the three amino acids of A₁, A₄, and Lᵢᵢ consists of threonine, threonine, and asparagine in this order, the PPR motif has such a selective RNA base-binding ability that the motif strongly binds to A, but does not bind to G, U, and C.
(3-13) When the combination of the three amino acids of A₁, A₄, and Lᵢᵢ consists of isoleucine, methionine, and aspartic acid in this order, the PPR motif has such a selective RNA base-binding ability that the motif strongly binds to U, and less strongly to C, but does not bind to A and G.
(3-14) When the combination of the three amino acids of A₁, A₄, and Lᵢᵢ consists of phenylalanine, proline, and aspartic acid in this order, the PPR motif has such a selective RNA base-binding ability that the motif strongly binds to U, and less strongly to C, but does not bind to A and G.
(3-15) When the combination of the three amino acids of A₁, A₄, and Lᵢᵢ consists of tyrosine, proline, and aspartic acid in this order, the PPR motif has such a selective RNA base-binding ability that the motif strongly binds to U, but does not bind to A, G, and C.
(3-16) When the combination of the three amino acids of A₁, A₄, and Lᵢᵢ consists of leucine, threonine, and aspartic acid in this order, the PPR motif has such a selective RNA base-binding ability that the motif strongly binds to G, but does not bind to A, U, and C.

[0061] Specifically, with respect to the DNA-binding PPR motifs, the relationship between combinations of the three of the 1st, 4th, and ii-th amino acids and the bases to which they can bind is as follows (see Patent document 2 mentioned above).

(2-1) When the combination of the three amino acids of A₁, A₄, and Lᵢᵢ consists of an arbitrary amino acid, glycine, and aspartic acid in this order, the PPR motif selectively binds to G.
(2-2) When the combination of the three amino acids of A₁, A₄, and Lᵢᵢ consists of glutamic acid, glycine, and aspartic acid in this order, the PPR motif selectively binds to G.
(2-3) When the combination of the three amino acids of A₁, A₄, and Lᵢᵢ consists of an arbitrary amino acid, glycine, and asparagine in this order, the PPR motif selectively binds to A.
(2-4) When the combination of the three amino acids of A₁, A₄, and Lᵢᵢ consists of glutamic acid, glycine, and asparagine in this order, the PPR motif selectively binds to A.
(2-5) When the combination of the three amino acids of A₁, A₄, and Lᵢᵢ consists of an arbitrary amino acid, glycine, and serine in this order, the PPR motif selectively binds to A, and less selectively to C.
(2-6) When the combination of the three amino acids of A₁, A₄, and Lᵢᵢ consists of an arbitrary amino acid, isoleucine, and an arbitrary amino acid in this order, the PPR motif selectively binds to T and C.
(2-7) When the combination of the three amino acids of A₁, A₄, and Lᵢᵢ consists of an arbitrary amino acid, isoleucine, and asparagine in this order, the PPR motif selectively binds to T, and less selectively to C.
(2-8) When the combination of the three amino acids of A₁, A₄, and Lᵢᵢ consists of an arbitrary amino acid, leucine, and an arbitrary amino acid in this order, the PPR motif selectively binds to T and C.
(2-9) When the combination of the three amino acids of A₁, A₄, and Lᵢᵢ consists of an arbitrary amino acid, leucine, and aspartic acid in this order, the PPR motif selectively binds to C.
(2-10) When the combination of the three amino acids of A₁, A₄, and Lᵢᵢ consists of an arbitrary amino acid, leucine, and lysine in this order, the PPR motif selectively binds to T.
(2-11) When the combination of the three amino acids of A₁, A₄, and Lᵢᵢ consists of an arbitrary amino acid, methionine, and an arbitrary amino acid in this order, the PPR motif selectively binds to T.
(2-12) When the combination of the three amino acids of A₁, A₄, and Lᵢᵢ consists of an arbitrary amino acid, methionine, and aspartic acid in this order, the PPR motif selectively binds to T.
(2-13) When the combination of the three amino acids of A₁, A₄, and Lᵢᵢ consists of isoleucine, methionine, and aspartic acid in this order, the PPR motif selectively binds to T, and less selectively to C.
(2-14) When the combination of the three amino acids of A₁, A₄, and Lᵢᵢ consists of an arbitrary amino acid, asparagine, and an arbitrary amino acid in this order, the PPR motif selectively binds to C and T.
(2-15) When the combination of the three amino acids of A₁, A₄, and Lᵢᵢ consists of an arbitrary amino acid, asparagine, and aspartic acid in this order, the PPR motif selectively binds to T.
(2-16) When the combination of the three amino acids of A₁, A₄, and Lᵢᵢ consists of phenylalanine, asparagine, and aspartic acid in this order, the PPR motif selectively binds to T.
(2-17) When the combination of the three amino acids of A₁, A₄, and Lᵢᵢ consists of glycine, asparagine, and aspartic acid in this order, the PPR motif selectively binds to T.
(2-18) When the combination of the three amino acids of A₁, A₄, and Lᵢᵢ consists of isoleucine, asparagine, and aspartic acid in this order, the PPR motif selectively binds to T.
(2-19) When the combination of the three amino acids of A₁, A₄, and Lᵢᵢ consists of threonine, asparagine, and aspartic acid in this order, the PPR motif selectively binds to T.
(2-20) When the combination of the three amino acids of A₁, A₄, and Lᵢᵢ consists of valine, asparagine, and aspartic acid in this order, the PPR motif selectively binds to T, and less selectively to C.
(2-21) When the combination of the three amino acids of A₁, A₄, and Lᵢᵢ consists of tyrosine, asparagine, and aspartic acid in this order, the PPR motif selectively binds to T, and less selectively to C.
(2-22) When the combination of the three amino acids of A₁, A₄, and Lᵢᵢ consists of an arbitrary amino acid, asparagine, and asparagine in this order, the PPR motif selectively binds to C.
(2-23) When the combination of the three amino acids of A₁, A₄, and Lᵢᵢ consists of isoleucine, asparagine, and asparagine in this order, the PPR motif selectively binds to C.
(2-24) When the combination of the three amino acids of A₁, A₄, and Lᵢᵢ consists of serine, asparagine, and asparagine in this order, the PPR motif selectively binds to C.
(2-25) When the combination of the three amino acids of A₁, A₄, and Lᵢᵢ consists of valine, asparagine, and asparagine in this order, the PPR motif selectively binds to C.
(2-26) When the combination of the three amino acids of A₁, A₄, and Lᵢᵢ consists of an arbitrary amino acid, asparagine, and serine in this order, the PPR motif selectively binds to C.
(2-27) When the combination of the three amino acids of A₁, A₄, and Lᵢᵢ consists of valine, asparagine, and serine in this order, the PPR motif selectively binds to C.
(2-28) When the combination of the three amino acids of A₁, A₄, and Lᵢᵢ consists of an arbitrary amino acid, asparagine, and threonine in this order, the PPR motif selectively binds to C.
(2-29) When the combination of the three amino acids of A₁, A₄, and Lᵢᵢ consists of valine, asparagine, and threonine in this order, the PPR motif selectively binds to C.
(2-30) When the combination of the three amino acids of A₁, A₄, and Lᵢᵢ consists of an arbitrary amino acid, asparagine, and tryptophan in this order, the PPR motif selectively binds to C, and less selectively to T.
(2-31) When the combination of the three amino acids of A₁, A₄, and Lᵢᵢ consists of isoleucine, asparagine, and tryptophan in this order, the PPR motif selectively binds to T, and less selectively to C.
(2-32) When the combination of the three amino acids of A₁, A₄, and Lᵢᵢ consists of an arbitrary amino acid, proline, and an arbitrary amino acid in this order, the PPR motif selectively binds to T.
(2-33) When the combination of the three amino acids of A₁, A₄, and Lᵢᵢ consists of an arbitrary amino acid, proline, and aspartic acid in this order, the PPR motif selectively binds to T.
(2-34) When the combination of the three amino acids of A₁, A₄, and Lᵢᵢ consists of phenylalanine, proline, and aspartic acid in this order, the PPR motif selectively binds to T.
(2-35) When the combination of the three amino acids of A₁, A₄, and Lᵢᵢ consists of tyrosine, proline, and aspartic acid in this order, the PPR motif selectively binds to T.
(2-36) When the combination of the three amino acids of A₁, A₄, and Lᵢᵢ consists of an arbitrary amino acid, serine, and an arbitrary amino acid in this order, the PPR motif selectively binds to A and G.
(2-37) When the combination of the three amino acids of A₁, A₄, and Lᵢᵢ consists of an arbitrary amino acid, serine, and asparagine in this order, the PPR motif selectively binds to A.
(2-38) When the combination of the three amino acids of A₁, A₄, and Lᵢᵢ consists of phenylalanine, serine, and asparagine in this order, the PPR motif selectively binds to A.
(2-39) When the combination of the three amino acids of A₁, A₄, and Lᵢᵢ consists of valine, serine, and asparagine in this order, the PPR motif selectively binds to A.
(2-40) When the combination of the three amino acids of A₁, A₄, and Lᵢᵢ consists of an arbitrary amino acid, threonine, and an arbitrary amino acid in this order, the PPR motif selectively binds to A and G.
(2-41) When the combination of the three amino acids of A₁, A₄, and Lᵢᵢ consists of an arbitrary amino acid, threonine, and aspartic acid in this order, the PPR motif selectively binds to G.
(2-42) When the combination of the three amino acids of A₁, A₄, and Lᵢᵢ consists of valine, threonine, and aspartic acid in this order, the PPR motif selectively binds to G.
(2-43) When the combination of the three amino acids of A₁, A₄, and Lᵢᵢ consists of an arbitrary amino acid, threonine, and asparagine in this order, the PPR motif selectively binds to A.
(2-44) When the combination of the three amino acids of A₁, A₄, and Lᵢᵢ consists of phenylalanine, threonine, and asparagine in this order, the PPR motif selectively binds to A.
(2-45) When the combination of the three amino acids of A₁, A₄, and Lᵢᵢ consists of isoleucine, threonine, and asparagine in this order, the PPR motif selectively binds to A.
(2-46) When the combination of the three amino acids of A₁, A₄, and Lᵢᵢ consists of valine, threonine, and asparagine in this order, the PPR motif selectively binds to A.
(2-47) When the combination of the three amino acids of A₁, A₄, and Lᵢᵢ consists of an arbitrary amino acid, valine, and an arbitrary amino acid in this order, the PPR motif binds to A, C, and T, but does not bind to G.
(2-48) When the combination of the three amino acids of A₁, A₄, and Lᵢᵢ consists of isoleucine, valine, and aspartic acid in this order, the PPR motif selectively binds to C, and less selectively to A.
(2-49) When the combination of the three amino acids of A₁, A₄, and Lᵢᵢ consists of an arbitrary amino acid, valine, and glycine in this order, the PPR motif selectively binds to C.
(2-50) When the combination of the three amino acids of A₁, A₄, and Lᵢᵢ consists of an arbitrary amino acid, valine, and threonine in this order, the PPR motif selectively binds to T.

### (Novel PPR Motifs)

[0062] The present invention provides novel PPR motifs. The novel PPR motifs having an adenine-binding property provided by the present invention are (A-1), (A-2), and (A-3) mentioned below:

(A-1) a PPR motif consisting of the sequence of SEQ ID NO: 9, or a PPR motif consisting of the sequence of SEQ ID NO: 9 having a substitution selected from the group consisting of substitution of the amino acid at position 10 with tyrosine, substitution of the amino acid at position 15 with lysine, substitution of the amino acid at position 16 with leucine, substitution of the amino acid at position 17 with glutamic acid, substitution of the amino acid at position 18 with aspartic acid, and substitution of the amino acid at position 28 with glutamic acid;
(A-2) a PPR motif consisting of the sequence of SEQ ID NO: 9 having a substitution, deletion, or addition of 1 to 20 amino acids other than the amino acids at positions 1, 2, 3, 4, 6, 7, 9, 11, 12, 14, 19, 26, 30, 33, and 34, and having an adenine-binding property; and
(A-3) a PPR motif having a sequence identity of at least 42% to the sequence of SEQ ID NO: 9, provided that the amino acids at positions 1, 2, 3, 4, 6, 7, 9, 11, 12, 14, 19, 26, 30, 33, and 34 are identical, and having an adenine-binding property;

[0063] The substitution in the motif of (A-1) may consist of one, two or more, or all of the substitutions mentioned above.

[0064] In the motif of (A-2), 1 to 20 amino acids other than the amino acids at positions 1, 2, 3, 4, 6, 7, 9, 11, 12, 14, 19, 26, 30, 33, and 34, which are amino acids in the sequence of SEQ ID NO: 9 that may be substituted or the like are:

[0065] preferably, 1 to 11 amino acids other than the amino acids at positions 1, 2, 3, 4, 6, 7, 9, 11, 12, 14, 19, 26, 30, 33, and 34, and other than the amino acids at positions 5, 8, 13, 21, 22, 23, 25, 29, and 35,

[0066] more preferably, 1 to 7 amino acids other than the amino acids at positions 1, 2, 3, 4, 6, 7, 9, 11, 12, 14, 19, 26, 30, 33, and 34, other than the amino acids at positions 5, 8, 13, 21, 22, 23, 25, 29, and 35, and other than the amino acids at positions 20, 24, 31, and 32,

[0067] further preferably, any of the amino acids at positions 10, 15, 16, 17, 18, and 28.

[0068] The characteristic of the motif (A-3) of having a sequence identity of at least 42% to the sequence of SEQ ID NO: 9, provided that the amino acids at positions 1, 2, 3, 4, 6, 7, 9, 11, 12, 14, 19, 26, 30, 33, and 34 are identical is:

[0069] preferably, to have a sequence identity of at least 71% to the sequence of SEQ ID NO: 9, provided that the amino acids at positions 1, 2, 3, 4, 6, 7, 9, 11, 12, 14, 19, 26, 30, 33, and 34, and the amino acids at positions 5, 8, 13, 21, 22, 23, 25, 29, and 35 are identical,

[0070] more preferably, to have a sequence identity of at least 80% to the sequence of SEQ ID NO: 9, provided that the amino acids at positions 1, 2, 3, 4, 6, 7, 9, 11, 12, 14, 19, 26, 30, 33, and 34, the amino acids at positions 5, 8, 13, 21, 22, 23, 25, 29, and 35, and the amino acids at positions 20, 24, 31 and 32 are identical,

[0071] still more preferably, to have a sequence identity of at least 82% to the sequence of SEQ ID NO: 9, provided that the amino acid not identical is any of the amino acids at positions 10, 15, 16, 17, 18, and 28.

[0072] Novel PPR motifs and having a cytosine-binding property provided by the present invention are (C-1), (C-2), and (C-3) mentioned below:

(C-1) a PPR motif consisting of the sequence of SEQ ID NO: 10, or a PPR motif consisting of the sequence of SEQ ID NO: 10 having a substitution of amino acid selected from the group consisting of substitution of the amino acid at position 2 with serine, substitution of the amino acid at position 5 with isoleucine, substitution of the amino acid at position 7 with leucine, substitution of the amino acid at position 8 with lysine, substitution of the amino acid at position 10 with phenylalanine or tyrosine, substitution of the amino acid at position 15 with arginine, substitution of the amino acid at position 22 with valine, substitution of the amino acid at position 24 with arginine, substitution of the amino acid at position 27 with leucine, and substitution of the amino acid at position 29 with arginine;
(C-2) a PPR motif consisting of the sequence of SEQ ID NO: 10 having a substitution, deletion, or addition of 1 to 25 amino acids other than the amino acids at positions 1, 3, 4, 14, 18, 19, 26, 30, 33, and 34, and having a cytosine-binding property; and
(C-3) a PPR motif having a sequence identity of at least 25% to the sequence of SEQ ID NO: 10, provided that the amino acids at positions 1, 3, 4, 14, 18, 19, 26, 30, 33, and 34 are identical, and having a cytosine-binding property;

[0073] The substitution in the motif (C-1) may consist of one, two or more, or all of the substitutions mentioned.

[0074] In the motif (C-2), 1 to 25 of the amino acids other than the amino acids at positions 1, 3, 4, 14, 18, 19, 26, 30, 33, and 34, which are amino acids that may be substituted or the like, in the sequence of SEQ ID NO: 10 are

[0075] preferably, 1 to 14 amino acids other than the amino acids at positions 1, 3, 4, 14, 18, 19, 26, 30, 33, and 34, and other than the amino acids at positions 6, 9, 11, 12, 17, 20, 21, 23, 25, 28, and 35,

[0076] more preferably, 1 to 10 amino acids other than the amino acids at positions 1, 3, 4, 14, 18, 19, 26, 30, 33, and 34, other than the amino acids at positions 6, 9, 11, 12, 17, 20, 21, 23, 25, 28, and 35, and other than the amino acids at positions 13, 16, 31, and 32,

[0077] still more preferably, any of the amino acids at positions 2, 5, 7, 8, 10, 15, 22, 24, 27, and 29.

[0078] The characteristic of the motif (C-3) of having a sequence identity of at least 25% to the sequence of SEQ ID NO: 10, provided that the amino acids at positions 1, 3, 4, 14, 18, 19, 26, 30, 33, and 34 are identical is:

[0079] preferably, to have a sequence identity of at least 60% to the sequence of SEQ ID NO: 10, provided that the amino acids at positions 1, 3, 4, 14, 18, 19, 26, 30, 33, and 34 and the amino acids at 6, 9, 11, 12, 17, 20, 21, 23, 25, 28, and 35 are identical,

[0080] more preferably, to have a sequence identity of at least 71% to the sequence of SEQ ID NO: 10, provided that the amino acids at positions 1, 3, 4, 14, 18, 19, 26, 30, 33, and 34, the amino acids at positions 6, 9, 11, 12, 17, 20, 21, 23, 25, 28, and 35, and the amino acids at positions 13, 16, 31 and 32 are identical,

[0081] still more preferably, to have a sequence identity of at least 71% to the sequence of SEQ ID NO: 10, provided that the amino acid that is not identical are any of the amino acids at positions 2, 5, 7, 8, 10, 15, 22, 24, 27, and 29.

[0082] Novel PPR motifs having a guanine-binding property provided by the present invention and are (G-1), (G-2), and (G-3) mentioned below:

(G-1) a PPR motif consisting of the sequence of SEQ ID NO: 11, or a PPR motif consisting of the sequence of SEQ ID NO: 11 having a substitution selected from the group consisting of substitution of the amino acid at position 10 with phenylalanine, substitution of the amino acid at position 15 with aspartic acid, substitution of the amino acid at position 27 with valine, substitution of the amino acid at position 28 with serine, and substitution of the amino acid at position 35 with isoleucine;
(G-2) a PPR motif consisting of the sequence of SEQ ID NO: 11 having a substitution, deletion, or addition of 1 to 21 amino acids other than the amino acids at positions 1, 2, 3, 4, 6, 7, 9, 14, 18, 19, 26, 30, 33, and 34, and having a guanine-binding property; and
(G-3) a PPR motif having a sequence identity of at least 40% to the sequence of SEQ ID NO: 11, provided that the amino acids at positions 1, 2, 3, 4, 6, 7, 9, 14, 18, 19, 26, 30, 33, and 34 are identical, and having a guanine-binding property.

[0083] The substitution in the motif of (G-1) may consist of one, two or more, or all of the substitutions mentioned above.

[0084] In the motif of (G-2), 1 to 21 amino acids other than the amino acids at positions 1, 2, 3, 4, 6, 7, 9, 14, 18, 19, 26, 30, 33, and 34, which are amino acids that may be substituted or the like, in the sequence of SEQ ID NO: 11 are:

[0085] preferably, 1 to 12 amino acids other than the amino acids at positions 1, 2, 3, 4, 6, 7, 9, 14, 18, 19, 26, 30, 33, and 34, and other than the amino acids at positions 5, 11, 12, 17, 20, 21, 22, 23, and 25,

[0086] more preferably, 1 to 5 amino acids other than the amino acids at positions 1, 2, 3, 4, 6, 7, 9, 14, 18, 19, 26, 30, 33, and 34, other than the amino acids at positions 5, 11, 12, 17, 20, 21, 22, 23, and 25, and other than the amino acids at positions 8, 13, 16, 24, 29, 31, and 32,

[0087] still more preferably, any of the amino acids at positions 10, 15, 27, 28, and 35.

[0088] The characteristic of the motif (G-3) of having a sequence identity of at least 40% to the sequence of SEQ ID NO: 11, provided that the amino acids at positions 1, 2, 3, 4, 6, 7, 9, 14, 18, 19, 26, 30, 33, and 34 are identical is:

[0089] preferably, to have a sequence identity of at least 65% to the sequence of SEQ ID NO: 11, provided that the amino acids at positions 1, 2, 3, 4, 6, 7, 9, 14, 18, 19, 26, 30, 33, and 34, and the amino acids at positions 5, 11, 12, 17, 20, 21, 22, 23, and 25 are identical;

[0090] more preferably, to have a sequence identity of at least 85% to the sequence of SEQ ID NO: 11, provided that the amino acids at positions 1, 2, 3, 4, 6, 7, 9, 14, 18, 19, 26, 30, 33, and 34, the amino acids at positions 5, 11, 12, 17, 20, 21, 22, 23, and 25, and the amino acids at positions 8, 13, 16, 24, 29, 31, and 32 are identical,

[0091] still more preferably, to have a sequence identity of at least 85% to the sequence of SEQ ID NO: 11, provided that the amino acid not identical is any of the amino acids at positions 10, 15, 27, 28, and 35.

[0092] Novel PPR motifs having a uracil-binding property provided by the present invention are the motifs of (U-1), (U-2), and (U-3) mentioned below:

(U-1) a PPR motif consisting of the sequence of SEQ ID NO: 12, or a PPR motif consisting of the sequence of SEQ ID NO: 12 having a substitution selected from the group consisting of substitution of the amino acid at position 10 with phenylalanine, substitution of the amino acid at position 13 with serine, substitution of the amino acid at position 15 with lysine, substitution of the amino acid at position 17 with glutamic acid, substitution of the amino acid at position 20 with leucine, substitution of the amino acid at position 21 with lysine, substitution of the amino acid at position 23 with phenylalanine, substitution of the amino acid at position 24 with aspartic acid, substitution of the amino acid at position 27 with lysine, substitution of the amino acid at position 28 with lysine, substitution of the amino acid at position 29 with arginine, and substitution of the amino acid at position 31 with leucine;
(U-2) a PPR motif consisting of the sequence of SEQ ID NO: 12 having a substitution, deletion, or addition of 1 to 22 amino acids other than the amino acids at positions 1, 2, 3, 4, 6, 11, 12, 14, 19, 26, 30, 33, and 34, and having a uracil-binding property; and
(U-3) a PPR motif having a sequence identity of at least 37% to the sequence of SEQ ID NO: 12, provided that the amino acids at positions 1, 2, 3, 4, 6, 11, 12, 14, 19, 26, 30, 33, and 34 are identical, and having a uracil-binding property.

[0093] The substitution in the motif (U-1) may consist of one, two or more, or all of the substitutions mentioned above.

[0094] In the motif of (U-2), 1 to 22 amino acids other than the amino acids at positions 1, 2, 3, 4, 6, 11, 12, 14, 19, 26, 30, 33, and 34, which are amino acids that may be substituted or the like, in the sequence of SEQ ID NO: 12 are

[0095] preferably, 1 to 14 amino acids other than the amino acids at positions 1, 2, 3, 4, 6, 11, 12, 14, 19, 26, 30, 33, and 34, and other than the amino acids at positions 5, 7, 9, 16, 18, 22, 25, and 35,

[0096] more preferably, 1 to 12 amino acids other than the amino acids at positions 1, 2, 3, 4, 6, 11, 12, 14, 19, 26, 30, 33, and 34, other than the amino acids at positions 5, 7, 9, 16, 18, 22, 25, and 35, and other than the amino acids at positions 8 and 32,

[0097] still more preferably, any of the amino acids at positions 10, 13, 15, 17, 20, 21, 23, 24, 27, 28, 29, and 31.

[0098] The characteristic of the motif (U-3) of having a sequence identity of at least 37% to the sequence of SEQ ID NO: 12, provided that the amino acids at positions 1, 2, 3, 4, 6, 11, 12, 14, 19, 26, 30, 33, and 34 are identical, is:

[0099] preferably, to have a sequence identity of at least 60% to the sequence of SEQ ID NO: 12, provided that the amino acids at positions 1, 2, 3, 4, 6, 11, 12, 14, 19, 26, 30, 33, and 34, and the amino acids at positions 5, 7, 9, 16, 18, 22, 25, and 35 are identical;

[0100] more preferably, to have a sequence identity of at least 65% to the sequence of SEQ ID NO: 12, provided that the amino acids at positions 1, 2, 3, 4, 6, 11, 12, 14, 19, 26, 30, 33, and 34, the amino acids at positions 5, 7, 9, 16, 18, 22, 25, and 35, and the amino acids at positions 8 and 32 are identical,

[0101] still more preferably, to have a sequence identity of at least 65% to the sequence of SEQ ID NO: 12, provided that the amino acid not identical is any of the amino acids at positions 10, 13, 15, 17, 20, 21, 23, 24, 27, 28, 29, and 31.

[0102] The PPR motifs v2_A (SEQ ID NO: 9), v2_C (SEQ ID NO: 10), v2_G (SEQ ID NO: 11), and v2_U (SEQ ID NO: 12), which were created by the inventors of the present invention, are disclosed for the first time by this application, and do not exist in nature. As for homologues thereof (the embodiments mentioned above as (A-1), (A-2), (A-3), (C-1), (C-2), (C-3), (G-1), (G-2), (G-3), (U-1), (U-2), and (U-3) and preferred embodiments thereof that comprises a sequence other than those of SEQ ID NOS: 9 to 12), it is considered that combinations of at least any two or more, e.g., 3, 4, 5, 6, 7, 8, 9, 10, 11, 12, 13, or 14, of the homologues do not exist in the nature (irrespective of whether or not the individual homologues are disclosed for the first time by this application, and whether or not they exist in the nature). In the present invention, the number meant by the term “any” may be an arbitrary number.

### (Explanation of Sequences of Novel PPR Motifs)

[0103] FIGS. 1 to 4 summarize types and occurring numbers of amino acids at every position in the Arabidopsis thaliana PPR motif sequences, for which there were collected the PPR motifs in which the combination of amino acids locating at positions 1, 4, and ii is VTN as adenine-recognizing PPR motifs, those in which the same is VSN as the cytosine-recognizing PPR motifs, those in which the same is VTD as the guanine-recognizing PPR motifs, and those in which the same is VND as the uracil-recognizing uracil PPR motifs. The amino acids at all the positions in the sequences of the novel PPR motif sequences v2_A (SEQ ID NO: 9), v2_C (SEQ ID NO: 10), v2_G (SEQ ID NO: 11), and v2_U (SEQ ID NO: 12) are those of high occurrence frequency. In FIG. 6A, along with these novel sequences, v1_A (SEQ ID NO: 13), v1_C (SEQ ID NO: 14), v1_G (SEQ ID NO: 15), and v1_U (SEQ ID NO: 16) are also shown, which sequences have the dPPR motif in which the combination of the amino acids at positions 1, 4, and ii is the same as that of v2.

[0104] FIG. 6A also shows the amino acid sequence of the v3.1 motif v3.1 is the same as v2 except that a D15K mutation is introduced into the adenine-recognizing motif of v2 (SEQ ID NO: 401), and thus the other parts of them are identical. Use of v3.1 in PPR proteins may provide those showing improved binding power compared with v2.

[0105] Further, Tables 1 to 4 mentioned below summarize magnitudes of deviations of occurrence frequency of the amino acids in the sequences of SEQ ID NOS: 9 to 12 from random occurrence (e.g., if 100 PPR motifs are collected, and it is supposed that the amino acids randomly occur at a certain position as for the occurrence frequency of the amino acids, each of the 20 types of amino acids should appear 5 times at that position). If the occurrence frequency of amino acid at a certain position is deviated from random occurrence and high, it is considered that the amino acid at that position is evolutionarily converged, and highly related to the function. Even if an amino acid is substituted with another type of amino acid of which occurrence frequency is deviated from random occurrence, and of which occurrence frequency is high, the function of the PPR motif can be maintained, so long as the amino acid highly relates to the function.

### (Novel PPR Protein)

[0106] The present invention provides novel PPR proteins containing a novel PPR motif.

[0107] The novel PPR proteins provided by the present invention are those mentioned below.

[0108] A protein comprising n of PPR motifs and capable of binding to a target RNA consisting of a sequence of n bases in length, wherein:

[0109] the PPR motif for adenine in the base sequence is the PPR motif of (A-1), (A-2), or (A-3) mentioned above;

[0110] the PPR motif for cytosine in the base sequence is the PPR motif of (C-1), (C-2), or (c-3) mentioned above;

[0111] the PPR motif for guanine in the base sequence is the PPR motif of (G-1), (G-2), or (G-3) mentioned above; and

[0112] the PPR motif for uracil in the base sequence is the PPR motif of (U-1), (U-2), or (U-3) mentioned above.

[0113] As for preferred examples of the PPR motifs contained in the PPR proteins, the descriptions concerning the PPR motifs for (A-1), (A-2), (A-3), (C-1), (C-2), (C-3), (G-1), (G-2), (G-3), (U-1), (U-2), or (U-3) mentioned above can be applied as they are.

[0114] In the PPR protein of the present invention, n (representing an integer of 1 or larger) is not particularly limited, but can be 10 or larger, preferably 12 or larger, more preferably 15 or larger, still more preferably 18 or larger. An increased number of the motifs allows preparation of a PPR protein showing a high binding strength to larger number of kinds of targets.

[0115] While preparations of artificial PPR proteins comprising of 7 to 14 motifs have so far been reported as shown in the tables mentioned below, it has been considered that construction of a gene for a PPR protein containing a larger number of PPR motifs, which should inevitably result in larger number of repeats in nucleotide sequence of the gene sequence encoding such a protein. In general, it may be difficult to prepare genes containing repeat sequences, because, for example, the repeat moieties are recombined during the cloning process (Trinh, T. et al., An Escherichia coli strain for the stable propagation of retroviral clones and direct repeat sequences, Focus, 16, 78-80 (1994)).

[0116] In the table, the Kd values are the lowest values among those given in the literature.

TABLE 5

| | | | | | | PPR motif sequence | | | | | | | | | | | | | | | |
|---|---|---|---|---|---|---|---|---|---|---|---|---|---|---|---|---|---|---|---|---|---|
| | | | | Number | Kd | | | | | | | | | | | | | | | | |
| | Reference | | Name | of motif | value | 1 | 2 | 3 | 4 | 5 | 6 | 7 | 8 | 9 | 10 | 11 | 12 | 13 | 14 | 15 | 16 |
| 1 | Coquille et al | Non-pat. doc. 1 | cPPR | 8 | > 370 nM | X | T | Y | X | T | L | I | S | G | L | G | K | A | G | R | L |
| 2 | Shen et al. 1 | Non-pat. doc. 2 | dPPR | 10 | >90 nM | X | T | Y | X | T | L | I | D | G | L | C | K | A | G | K | L |
| 3 | Shen et al. 2 | Non-pat. doc. 3 | dPPR | 10 | >14.6 nM | X | T | Y | X | T | L | I | D | G | L | C | K | A | G | K | L |
| 4 | Gully et al., | Non-pat. doc. 4 | synthPPR | 4 | N.D. | X | T | Y | X | T | L | I | D | G | L | A | K | A | G | R | L |
| 5 | Miranda et al. | Non-pat. doc. 5 | SCD | 11, 14 | >7.5 nM | X | T | Y | X | T | L | I | D | G | L | C | K | A | G | K | L |
| 6 | Miranda et al. | | MCD_U | 14 | >18 nM | V | T | Y | N | I | L | I | K | G | L | C | K | A | G | K | L |
| 7 | Miranda et al. | | MCD_C | 14 | >18 nM | V | T | Y | N | T | L | I | S | G | F | C | K | A | G | R | L |
| 8 | Miranda et al. | | MCD_A | 14 | >18 nM | V | T | Y | T | T | L | I | D | A | F | C | R | K | G | R | L |
| 9 | Miranda et al. | | MCD_G | 14 | >18 nM | V | T | Y | T | I | L | I | D | A | L | C | K | A | G | R | L |
| 10 | Yan et al. | Non-pat. doc. 6 | dPPR | 10 | >16 nM | X | T | Y | X | T | L | I | D | G | L | C | K | A | G | K | L |

| | | | | | | | | | | | | | | | | | | | | SEO |
|---|---|---|---|---|---|---|---|---|---|---|---|---|---|---|---|---|---|---|---|---|
| | PPR motif sequence | | | | | | | | | | | | | | | | | | | ID |
| | 17 | 18 | 19 | 20 | 21 | 22 | 23 | 24 | 25 | 26 | 27 | 28 | 29 | 30 | 31 | 32 | 33 | ii | i | NO: |
| 1 | E | E | A | L | E | L | F | E | E | M | K | E | K | G | I | V | P | X | V | 1 |
| 2 | D | E | A | L | K | L | F | E | E | M | V | E | K | G | I | K | P | X | V | 2 |
| 3 | D | E | A | L | K | L | F | E | E | M | V | E | K | G | I | K | P | X | V | 2 |
| 4 | E | E | A | L | Q | L | F | Q | E | M | K | E | K | G | V | K | P | X | V | 3 |
| 5 | D | E | A | L | K | L | F | E | E | M | V | E | K | G | I | K | P | X | V | 4 |
| 6 | E | E | A | L | S | L | L | S | E | M | V | E | K | G | I | Q | P | D | V | 5 |
| 7 | E | E | A | M | S | L | F | S | E | M | K | S | K | G | L | V | P | S | V | 6 |
| 8 | D | E | A | L | S | L | F | S | E | M | K | S | K | G | I | K | P | N | V | 7 |
| 9 | E | E | A | L | S | L | F | S | E | M | K | E | I | G | 1 | K | P | D | V | 8 |
| 10 | D | E | A | L | K | L | F | E | E | M | V | E | K | G | 1 | K | P | X | V | 2 |

[0117] When constructing a gene for a PPR protein having 15 or more PPR motifs, a gene in which number of repeat is reduced can be constructed by appropriately changing nucleotide sequences encoding amino acids other than the amino acids at positions of 1, 4, and ii responsible to the binding (when the Golden Gate method described below is used, the 5th to 33rd 29 of amino acids other than the common both end regions) among the motifs using codon degeneracy. Magnitude of the change can be appropriately determined by those skilled in the art, and for example, 4.5% or more (at more than 4 positions in 87 bases), 15% or more, or 30% or more (at more than 26 positions in 87 bases) of the bases can be changed.

[0118] For example, examples of nucleotide sequences encoding a motif obtained by utilizing codon degeneracy from the existing sequences encoding v1 to v4 motifs (SEQ ID NOS: 13 to 16) include those sequences shown in the table mentioned below.

TABLE 6

| Position | 4 | 5 | 6 | 7 | 8 | 9 | 10 | 11 | 12 | 13 | 14 | 15 | 16 | 17 | 18 | 19 |
|---|---|---|---|---|---|---|---|---|---|---|---|---|---|---|---|---|
| “A” | T | T | L | I | D | G | L | C | K | A | G | K | L | D | E | A |
| motif | ACC | ACG | CTG | ATC | GAT | GGT | CTG | TGT | AAG | GCC | GGC | AAA | TTA | GAT | GAG | GCC |
| “C” | N | T | L | I | D | G | L | C | K | A | G | K | L | D | E | A |
| motif | AAC | ACC | CTG | ATT | GAT | GGC | TTA | TGC | AAA | GCG | GGT | AAG | CTG | GAT | GAA | GCG |
| “G” | T | T | L | I | D | G | L | C | K | A | G | K | L | D | E | A |
| motif | ACC | ACG | CTG | ATC | GAT | GGT | CTG | TGT | AAG | GCC | GGT | AAA | TTA | GAT | GAA | GCG |
| “U” | N | T | L | I | D | G | L | C | K | A | G | K | L | D | E | A |
| motif | AAT | ACG | CTG | ATT | GAT | GGC | TTA | TGT | AAA | GCG | GGT | AAG | CTG | GAT | GAG | GCC |
| | Position | 20 | 21 | 22 | 23 | 24 | 25 | 26 | 27 | 28 | 29 | 30 | 31 | 32 | 33 | 11 |
| | “A” | L | K | L | F | E | E | M | V | E | K | G | I | K | P | N |
| | motif | CTG | AAG | TTA | TTC | GAA | GAG | ATG | GTT | GAA | AAA | GGC | ATC | AAG | CCG | AAC |
| | “C” | L | K | L | F | E | E | M | V | E | K | G | I | K | P | S |
| | motif | TTA | AAA | CTG | TTT | GAG | GAA | ATG | GTG | GAG | AAG | GGT | ATT | AAA | CCG | AGC |
| | “G” | L | K | L | F | E | E | M | V | E | K | G | I | K | P | D |
| | motif | CTG | AAG | TTA | TTC | GAA | GAG | ATG | GTT | GAA | AAA | GG | ATC | AAG | CCG | GAT |
| | “U” | L | K | L | F | E | E | M | V | E | K | G | I | K | P | D |
| | motif | TTA | AAA | CTG | TTT | GAG | GAA | ATG | GTG | GAG | AAG | GGC | ATT | AAA | CCG | GAT |

[0119] The term “preparation” can be rephrased as “production” or “manufacturing”. In addition, the term “construction” is sometimes used to refer to preparation of a gene or the like by combining parts, and “construction” can also be rephrased as “production” or “manufacturing”.

### (Nucleic Acids Encoding PPR Motif and PPR Protein)

[0120] The present invention provides nucleic acids encoding novel PPR motifs and novel PPR proteins containing the motifs. There are several variations in the nucleic acid sequences encoding the novel PPR motifs due to codon degeneracy.

[0121] Preferred examples of nucleotide sequences encoding the amino acid sequences of the novel PPR motifs of the present invention, v2_A (SEQ ID NO: 9), v2_C (SEQ ID NO: 10), v2_G (SEQ ID NO: 11), and v2_U (SEQ ID NO: 12), are shown in the table mentioned below.

TABLE 7-1

| | | SEQ |
|---|---|---|
| | | ID |
| Name | Nucleotide sequence | NO: |
| v2_A1_1 | GTCACATACACCACACTGATCGACG | 358 |
| | GACTGTGTAAAGCCGGCGACGTGGA | |
| | CGAAGCCCTCGAGCTGTTCAAAGAG | |
| | ATGCGGAGCAAGGGCGTGAAGCCCA | |
| | ACGTG | |
| v2_C1_1 | GTCACATACAACACCCTGATCGACG | 359 |
| | GCCTGTGCAAGGCCGGCAGACTGGA | |
| | TGAGGCCGAGGAGCTGCTGGAGGAG | |
| | ATGGAGGAGAAGGGCATCAAGCCCG | |
| | ACGTG | |
| v2_G1_1 | GTCACATACACCACCCTGATCGACG | 360 |
| | GCCTGTGCAAGGCCGGCAAGGTGGA | |
| | TGAGGCCCTGGAGCTGTTCGACGAG | |
| | ATGAAGGAGAGGGGCATCAAGCCCG | |
| | ACGTG | |
| v2_U1_1 | GTCACATACAACACCCTGATCGACG | 361 |
| | GCCTGTGCAAGAGCGGCAAGATCGA | |
| | GGAGGCCCTGAAGCTGTTCAAGGAG | |
| | ATGGAGGAGAAGGGCATCACCCCCA | |
| | GCGTG | |
| v2_G2_1 | GTCACATACACCACCCTGATCGACG | 362 |
| | GCCTGTGCAAGGCCGGCAAAGTGGA | |
| | CGAGGCCCTGGAGCTGTTCGACGAG | |
| | ATGAAGGAGAGGGGCATCAAGCCCG | |
| | ACGTG | |
| v2_A2_2 | GTGACATACACCACACTGATCGACG | 363 |
| | GACTGTGTAAAGCCGGCGACGTGGA | |
| | CGAAGCCCTCGAGCTGTTCAAAGAG | |
| | ATGCGGAGCAAGGGCGTGAAGCCCA | |
| | ACGTG | |
| v2_C2_2 | GTGACATACAACACCCTGATCGACG | 364 |
| | GCCTGTGCAAGGCCGGCAGACTGGA | |
| | TGAGGCCGAGGAGCTGCTGGAGGAG | |
| | ATGGAGGAGAAGGGCATCAAGCCCG | |
| | ACGTG | |
| v2_G2_2 | GTGACATACACCACCCTGATCGACG | 365 |
| | GCCTGTGCAAGGCCGGCAAGGTGGA | |
| | TGAGGCCCTGGAGCTGTTCGACGAG | |
| | ATGAAGGAGAGGGGCATCAAGCCCG | |
| | ACGTG | |
| v2_U1_2 | GTGACATACAACACCCTGATCGACG | 366 |
| | GCCTGTGCAAGAGCGGCAAGATCGA | |
| | GGAGGCCCTGAAGCTGTTCAAGGAG | |
| | ATGGAGGAGAAGGGCATCACCCCCA | |
| | GCGTG | |
| v2_G2_2 | GTGACATACACCACCCTGATCGACG | 367 |
| | GCCTGTGCAAGGCCGGCAAAGTGGA | |
| | CGAGGCCCTGGAGCTGTTCGACGAG | |
| | ATGAAGGAGAGGGGCATCAAGCCCG | |
| | ACGTG | |
| v2_A2_3 | GTTACATACACCACACTGATCGACG | 368 |
| | GACTGTGTAAAGCCGGCGACGTGGA | |
| | CGAAGCCCTCGAGCTGTTCAAAGAG | |
| | ATGCGGAGCAAGGGCGTGAAGCCCA | |
| | ACGTG | |
| v2_C1_3 | GTTACATACAACACCCTGATCGACG | 369 |
| | GCCTGTGCAAGGCCGGCAGACTGGA | |
| | TGAGGCCGAGGAGCTGCTGGAGGAG | |
| | ATGGAGGAGAAGGGCATCAAGCCCG | |
| | ACGTG | |
| v2_G1_3 | GTTACATACACCACCCTGATCGACG | 370 |
| | GCCTGTGCAAGGCCGGCAAGGTGGA | |
| | TGAGGCCCTGGAGCTGTTCGACGAG | |
| | ATGAAGGAGAGGGGCATCAAGCCCG | |
| | ACGTG | |
| v2_U1_3 | GTTACATACAACACCCTGATCGACG | 371 |
| | GCCTGTGCAAGAGCGGCAAGATCGA | |
| | GGAGGCCCTGAAGCTGTTCAAGGAG | |
| | ATGGAGGAGAAGGGCATCACCCCCA | |
| | GCGTG | |
| v2_G2_3 | GTTACATACACCACCCTGATCGACG | 372 |
| | GCCTGTGCAAGGCCGGCAAAGTGGA | |
| | CGAGGCCCTGGAGCTGTTCGACGAG | |
| | ATGAAGGAGAGGGGCATCAAGCCCG | |
| | ACGTG | |

[0122] The nucleotide sequences encoding the amino acid sequences of the PPR motifs v1_A (SEQ ID NO: 13), v1_C (SEQ ID NO: 14), v1_G (SEQ ID NO: 15), and v1_U (SEQ ID NO: 16), which correspond to the dPPR motif having the same combination of the amino acids at positions 1, 4, and ii as that of v2, are shown in the table mentioned below.

TABLE 7-2

| | | SEQ |
|---|---|---|
| | | ID |
| Name | Nucleotide sequence | NO: |
| v1_A1_1 | GTCACATACACCACGCTGATCGATG | 373 |
| | GTCTGTGTAAGGCCGGCAAATTAGA | |
| | TGAGGCCCTGAAGTTATTCGAAGAG | |
| | ATGGTTGAAAAAGGCATCAAGCCGA | |
| | ACGTG | |
| v1_c1_1 | GTCACATACAACACCCTGATTGATG | 374 |
| | GCTTATGCAAAGCGGGTAAGCTGGA | |
| | TGAAGCGTTAAAACTGTTTGAGGAA | |
| | ATGGTGGAGAAGGGTATTAAACCGA | |
| | GCGTG | |
| v1_G1_1 | GTCACATACACCACGCTGATCGATG | 375 |
| | GTCTGTGTAAGGCCGGTAAATTAGA | |
| | TGAAGCGCTGAAGTTATTCGAAGAG | |
| | ATGGTTGAAAAAGGTATCAAGCCGG | |
| | CCGGATGTG | |
| v1_U1_1 | GTCACATACAATACGCTGATTGATG | 376 |
| | GCTTATGTAAAGCGGGTAAGCTGGA | |
| | TGAGGCCTTAAAACTGTTTGAGGAA | |
| | ATGGTGGAGAAGGGCATTAAACCGG | |
| | ATGTG | |
| v1_G2_1 | GTCACATACACCACGCTGATCGATG | 377 |
| | GTCTGTGTAAGGCCGGTAAATTAGA | |
| | TGAAGCGCTGAAGTTATTCGAAGAG | |
| | ATGGTTGAAAAAGGTATCAAGCCGG | |
| | ACGTG | |
| v1_u2_1 | GTCACATACAATACGCTGATTGATG | 378 |
| | GCTTATGTAAAGCGGGTAAGCTGGA | |
| | TGAGGCCTTAAAACTGTTTGAGGAA | |
| | ATGGTGGAGAAGGGCATTAAACCGG | |
| | ACGTG | |
| v1_A1_2 | GTGACATACACCACGCTGATCGATG | 379 |
| | GTCTGTGTAAGGCCGGCAAATTAGA | |
| | TGAGGCCCTGAAGTTATTCGAAGAG | |
| | ATGGTTGAAAAAGGCATCAAGCCGA | |
| | ACGTG | |
| v1_C1_2 | GTGACATACAACACCCTGATTGATG | 380 |
| | GCTTATGCAAAGCGGGTAAGCTGGA | |
| | TGAAGCGTTAAAACTGTTTGAGGAA | |
| | ATGGTGGAGAAGGGTATTAAACCGA | |
| | GCGTG | |
| v1_G1_2 | GTGACATACACCACGCTGATCGATG | 381 |
| | GTCTGTGTAAGGCCGGTAAATTAGA | |
| | TGAAGCGCTGAAGTTATTCGAAGAG | |
| | ATGGTTGAAAAAGGTATCAAGCCGG | |
| | ATGTG | |
| v1_U1_2 | GTGACATACAATACGCTGATTGATG | 382 |
| | GCTTATGTAAAGCGGGTAAGCTGGA | |
| | TGAGGCCTTAAAACTGTTTGAGGAA | |
| | ATGGTGGAGAAGGGCATTAAACCGG | |
| | ATGTG | |
| v1_G2_2 | GTGACATACACCACGCTGATCGATG | 383 |
| | GTCTGTGTAAGGCCGGTAAATTAGA | |
| | TGAAGCGCTGAAGTTATTCGAAGAG | |
| | ATGGTTGAAAAAGGTATCAAGCCGG | |
| | ACGTG | |
| v1_U2_2 | GTGACATACAATACGCTGATTGATG | 384 |
| | GCTTATGTAAAGCGGGTAAGCTGGA | |
| | TGAGGCCTTAAAACTGTTTGAGGAA | |
| | ATGGTGGAGAAGGGCATTAAACCGG | |
| | ACGTG | |
| v1_A1_3 | GTTACATACACCACGCTGATCGATG | 385 |
| | GTCTGTGTAAGGCCGGCAAATTAGA | |
| | TGAGGCCCTGAAGTTATTCGAAGAG | |
| | ATGGTTGAAAAAGGCATCAAGCCGA | |
| | ACGTG | |
| v1_C1_3 | GTTACATACAACACCCTGATTGATG | 386 |
| | GCTTATGCAAAGCGGGTAAGCTGGA | |
| | TGAAGCGTTAAAACTGTTTGAGGAA | |
| | ATGGTGGAGAAGGGTATTAAACCGA | |
| | GCGTG | |
| v1_G1_3 | GTTACATACACCACGCTGATCGATG | 387 |
| | GTCTGTGTAAGGCCGGTAAATTAGA | |
| | TGAAGCGCTGAAGTTATTCGAAGAG | |
| | ATGGTTGAAAAAGGTATCAAGCCGG | |
| | ATGTG | |
| v1_U1_3 | GTTACATACAATACGCTGATTGATG | 388 |
| | GCTTATGTAAAGCGGGTAAGCTGGA | |
| | TGAGGCCTTAAAACTGTTTGAGGAA | |
| | ATGGTGGAGAAGGGCATTAAACCGG | |
| | ATGTG | |
| v1_G2_3 | GTTACATACACCACGCTGATCGATG | 389 |
| | GTCTGTGTAAGGCCGGTAAATTAGA | |
| | TGAAGCGCTGAAGTTATTCGAAGAG | |
| | ATGGTTGAAAAAGGTATCAAGCCGG | |
| | ACGTG | |
| v1_U2_3 | GTTACATACAATACGCTGATTGATG | 390 |
| | GCTTATGTAAAGCGGGTAAGCTGGA | |
| | TGAGGCCTTAAAACTGTTTGAGGAA | |
| | ATGGTGGAGAAGGGCATTAAACCGG | |
| | ACGTG | |

[0123] The nucleotide sequence encoding the PPR protein can be constituted by any combination of the sequences mentioned above. The nucleotide sequence encoding the amino acids of the protein may be constituted by appropriately combining the nucleotide sequences encoding the amino acid sequences v2_A (SEQ ID NO: 9), v2_C (SEQ ID NO: 10), v2_G (SEQ ID NO: 11), and v2_U (SEQ ID NO: 12), and the nucleotide sequences encoding the amino acid sequences v1_A (SEQ ID NO: 13), v1_C (SEQ ID NO: 14), v1_G (SEQ ID NO: 15), and v1_U (SEQ ID NO: 16).

[0124] Preferred examples of the nucleotide sequences encoding the amino acid sequences v3.1_A (SEQ ID NO: 401), 1st_A (SEQ ID NO: 402), 1st_C (SEQ ID NO: 403), 1st_G (SEQ ID NO: 404), and 1st_U (SEQ ID NO: 405) of the novel PPR motifs of the present invention are shown in the table mentioned below.

TABLE 8

| | | SEQ |
|---|---|---|
| | | ID |
| Name | Nucleotide sequence | NO: |
| v3.1_A | GTGACCTACACCACACTGATCGACG | 406 |
| | GACTGTGCAAGGCCGGCAAAGTGGA | |
| | TGAGGCTCTGGAGCTGTTTAAGGAA | |
| | ATGAGAAGCAAGGGCGTCAAGCCCA | |
| | ACGTG | |
| v3.2_A | GTCACATACACCACCAACATCGACC | 407 |
| (1st_A) | AGCTGTGCAAAGCCGGCAAGGTGGA | |
| | TGAAGCTCTGGAGCTGTTCAAGGAG | |
| | ATGAGAAGCAAGGGCGTGAAGCCCA | |
| | ACGTG | |
| v3.2_C | GTCACATACAACACCAACATCGACC | 408 |
| (1st_C) | AGCTGTGCAAAAGCGGCAAGATCGA | |
| | GGAGGCTCTGAAACTGTTCAAGGAG | |
| | ATGGAGGAGAAGGGCATCACCCCCA | |
| | GCGTG | |
| v3.2_G | GTCACATACACCACCAACATCGACC | 409 |
| (1st_G) | AGCTCTGCAAGGCCGGCAAGGTGGA | |
| | TGAGGCTCTGGAGCTGTTCGACGAG | |
| | ATGAAGGAGAGAGGCATCAAGCCCG | |
| | ACGTG | |
| v3.2_U | GTCACATACAACACCAACATCGACC | 410 |
| (1st_U) | AGCTCTGCAAGGCCGGCAGACTGGA | |
| | CGAGGCCGAAGAGCTGCTGGAGGAG | |
| | ATGGAGGAGAAGGGCATCAAGCCCG | |
| | ACGTG | |

[0125] The nucleotide sequence encoding the PPR protein can be constituted by any combination of the sequences mentioned above. There may be chosen any one selected from v3.2_X mentioned above as the nucleotide sequence encoding the first PPR motif from the N-terminus, then for the nucleotide sequences encoding the following PPR motifs, v3.1_A mentioned above as the nucleotide sequence encoding the PPR motif for adenine, and those selected from the v2 series mentioned above as the nucleotide sequences encoding the PPR motifs for cytosine, guanine, and uracil, and they can be appropriately combined.

### (Improvement of Aggregation Property)

[0126] The inventors of the present invention found that the amino acid at position 6 of the PPR motif is extremely frequently hydrophobic amino acid (especially leucine) and the amino acid at position 9 is extremely frequently a non-hydrophilic amino acid (especially glycine) on the basis of the amino acid information of existing naturally occurring PPR motifs. On the basis of structures of the PPR proteins for which crystal structures have already been obtained (Non-patent document 6: Coquille et al., 2014 Nat. Commun., PDB ID: 4PJQ, 4WN4, 4WSL, 4PJR, Non-patent document 7: Shen et al., 2015 Nat. Commun., PDB ID: 519D, 5I9F, 5I9G, 5I9H), they imagined that since those 6th and 9th amino acids in the first motif (N-terminus side) are exposed to the outside, the proteins show aggregation property due to these exposed hydrophobic amino acids (FIG. 6A). On the other hand, they considered that, in the second and following motifs, the 6th and 9th amino acids are buried inside the protein, and form a hydrophobic core, and therefore if hydrophilic residues are placed as the 6th and 9th amino acids of all the motifs, the protein structure may collapse. Therefore, they decided to decrease the aggregation property of PPR by using hydrophilic amino acid (asparagine, aspartic acid, glutamine, glutamic acid, lysine, arginine, serine, and threonine) as the 6th amino acid, preferably the 6th and 9th amino acids, in only the first motif

[0127] Specific Procedure is as Follows.

[0128] In the first PPR motif (M₁) from the N-terminus of a protein capable of binding to a target nucleic acid having a specific nucleotide sequence:

(1) a hydrophilic amino acid is used as the A6 amino acid, preferably asparagine or aspartic acid is used as the A6 amino acid, and
(2) further, a hydrophilic amino acid or glycine, preferably glutamine, glutamic acid, lysine, or glycine, is used as the A9 amino acid, or
(3) the A6 amino acid and A9 amino acid are constituted by any of the following combinations;
[0129] combination of asparagine as the A6 amino acid and glutamic acid as the A9 amino acid,
[0130] combination of asparagine as the A6 amino acid and glutamine as the A9 amino acid,
[0131] combination of asparagine as the A6 amino acid and lysine as the A9 amino acid, and
[0132] combination of aspartic acid as the A6 amino acid and glycine as the A9 amino acid.

[0133] Among such PPR motifs, the followings are particularly preferred:

(1st_A-1) a PPR motif consisting of the sequence of SEQ ID NO: 402 having such substitutions of the amino acids at positions 6 and 9 that any one of the combinations defined below is satisfied;
(1st_A-2) a PPR motif comprising the sequence of (1st_A-1) having a substitution, deletion, or addition of 1 to 9 amino acids other than the amino acids at positions 1, 4, 6, 9, and 34, and having an adenine-binding property;
(1st_A-3) a PPR motif having a sequence identity of at least 80% to the sequence of
(1st_A-1), provided that the amino acids at positions 1, 4, 6, 9, and 34 are identical, and having an adenine-binding property;
(1st_C-1) a PPR motif consisting of the sequence of SEQ ID NO: 403;
(1st_C-2) a PPR motif comprising the sequence of (1st_C-1) having a substitution, deletion, or addition of 1 to 9 amino acids other than the amino acids at positions 1, 4, 6, 9, and 34, and having a cytosine-binding property;
(1st_C-3) a PPR motif having a sequence identity of at least 80% to the sequence of
(1st_C-1), provided that the amino acids at positions 1, 4, 6, 9, and 34 are identical, and having a cytosine binding property;
(1st_G-1) a PPR motif consisting of the sequence of SEQ ID NO: 404 having such substitutions of the amino acids at positions 6 and 9 that any one of the combinations defined below is satisfied;
(1st_G-2) a PPR motif comprising the sequence of (1st_G-1) having a substitution, deletion, or addition of 1 to 9 amino acids other than the amino acids at positions 1, 4, 6, 9, and 34, and having a guanine-binding property;
(1st_G-3) a PPR motif having a sequence identity of at least 80% to the sequence of
(1st_G-1), provided that the amino acids at positions 1, 4, 6, 9, and 34 are identical, and having a guanine-binding property;
(1st_U-1) a PPR motif consisting of the sequence of SEQ ID NO: 405 having such substitutions of the amino acids at positions 6 and 9 that any one of the combinations defined below is satisfied;
(1st_U-2) a PPR motif comprising the sequence of (1st_U-1) having a substitution, deletion, or addition of 1 to 9 amino acids other than the amino acids at positions 1, 4, 6, 9, and 34, and having a uracil-binding property; and
(1st_U-3) a PPR motif having a sequence identity of at least 80% to the sequence of
(1st_U-1), provided that the amino acids at positions 1, 4, 6, 9, and 34 are identical, and having a uracil-binding property:
[0134] a combination of asparagine as the amino acid at position 6 and glutamic acid as the amino acid at position 9,
[0135] a combination of asparagine as the amino acid at position 6 and glutamine as the amino acid at position 9,
[0136] a combination of asparagine as the amino acid at position 6 and lysine as the amino acid at position 9,
[0137] a combination of aspartic acid as the amino acid at position 6 and glycine as the amino acid at position 9.

[0138] FIG. 6A shows the amino acid sequences of the v3.2 motifs as well as those of the v3.1 motifs. In v3.2, the first motif is selected from 1st_A (SEQ ID NO: 402), 1st_C (SEQ ID NO: 403), 1st_G (SEQ ID NO: 404), and 1st_U (SEQ ID NO: 405), and the second and the following motifs are selected from v2_C, v2_G, v2_U, and v3.1_A. The use of any of the v3.2 as the first PPR motif from the N-terminus in a PPR protein may improve intracellular aggregation property.

### (Others)

[0139] The term “identity” used in the present invention for base sequence (also referred to as nucleotide sequence) or amino acid sequence means percentage of number of matched bases or amino acids shared between two sequences aligned in an optimal manner, unless especially stated. In other words, the identity can be calculated in accordance with the equation: Identity=(Number of matched positions/Total number of positions)×100, and it can be calculated by using commercially available algorithms. Such algorithms are also incorporated in the NBLAST and XBLAST programs described in Altschul et al., J. Mol. Biol., 215 (1990) 403-410. In more detail, the search and analysis for the identity of nucleotide or amino acid sequences can be performed with algorithms or programs well known to those skilled in the art (e.g., BLASTN, BLASTP, BLASTX, and ClustalW). In the case of using a program, parameters can be appropriately set by those skilled in the art, or the default parameters of each program can also be used. The specific procedures of these analysis methods are also well known to those skilled in the art.

[0140] In this description, when the identity is expressed as a percentage for a nucleotide sequence or amino acid sequence, a higher identity percentage value is preferred in both cases, unless especially stated, specifically, 70% or higher is preferred, 80% or higher is more preferred, 85% or higher is still more preferred, 90% or higher is further preferred, 95% or higher is still further preferred, and 97.5% or higher is even further preferred.

[0141] As for the term “sequence having a substitution, deletion, or addition” used in the present invention concerning PPR motif or protein, the number of amino acids substituted or the like is not particularly limited in any motif or protein, so long as the motif or protein comprising the amino acid sequence has the desired function, unless especially stated. The number of amino acids to be substituted, or the like may be about 1 to 9 or 1 to 4, or even larger number of amino acids may be substituted or the like if they are substituted with amino acids having similar properties. The means for preparing polynucleotides or proteins for such amino acid sequences are well known to those skilled in the art.

[0142] Amino acids having similar properties refer to amino acids with similar physical properties such as hydropathy, charge, pKa, and solubility, and refer to such amino acid as mentioned below, for example.

Hydrophobic (non-polar) amino acids; alanine, valine, glycine, isoleucine, leucine, phenylalanine, proline, tryptophan, tyrosine.
Non-hydrophobic amino acids; arginine, asparagine, aspartic acid, glutamic acid, glutamine, lysine, serine, threonine, cysteine, histidine, methionine.
Hydrophilic amino acids; arginine, asparagine, aspartic acid, glutamic acid, glutamine, lysine, serine, threonine.
Acidic amino acids: aspartic acid, glutamic acid.
Basic amino acids: lysine, arginine, histidine.
Neutral amino acids: alanine, asparagine, cysteine, glutamine, glycine, isoleucine, leucine, methionine, phenylalanine, proline, serine, threonine, tryptophan, tyrosine, valine.
Sulfur-containing amino acids: methionine, cysteine.
Aromatic ring-containing amino acids: tyrosine, tryptophan, phenylalanine.

[0143] The PPR motif, protein containing the same, or nucleic acids encoding the same of the present invention can be prepared by those skilled in the art using conventional techniques.

### [Performance of Novel PPR Motifs]

### (Binding Power)

[0144] PPR proteins prepared by using the novel PPR motifs of the present invention (SEQ ID NOS: 9 to 12) are not only suitable for preparation of PPR proteins for relatively long target RNAs, but also may have higher RNA-binding performance compared with PPR proteins prepared by using existing PPR motifs (SEQ ID NOS: 13 to 16) for the same target RNA.

[0145] In other words, use of the novel PPR motifs of the present invention in a PPR protein can increase the binding power to a target RNA compared with use of the existing PPR motifs. By increasing the binding power, the efficiency of RNA manipulation using the PPR protein in the cell can be improved. For example, the efficiency of intracellular splicing can be improved by using a PPR protein showing high binding power to a target (see Example 5).

[0146] The degree of the improvement of the binding power is considered to vary depending on the sequence and length of the target, and the binding power can be enhanced, for example, 1.1 times or more, more specifically 1.3 times or more, 2.0 times or more, 3.0 times or more, or 3.6 times or more.

[0147] The binding power to a target sequence can be evaluated by EMSA (Electrophoretic Mobility Shift Assay) or a method using Biacore. EMSA is a method utilizing a property of nucleic acid that when a sample consisting of a nucleic acid bound with a protein is electrophoresed, the mobility of the nucleic acid molecule changes from that of the nucleic acid not bound. Molecular interaction analyzers, such as Biacore as a typical example, enable kinetic analysis, and therefore allow detailed protein-nucleic acid binding analysis.

[0148] The binding power to a target sequence can also be evaluated by RPB-ELISA described later. In RPB-ELISA, a value obtained by subtracting background signal (luminescence signal value obtained with an objective PPR protein without adding the target RNA) from luminescence obtained with a sample containing the objective PPR protein and the target RNA thereof can be used as the binding power of the objective PPR protein and the target RNA thereof.

### (Specificity)

[0149] A PPR protein prepared by using the novel PPR motifs of the present invention may have a higher capacity in specificity for a target sequence compared with a PPR protein prepared by using existing PPR motifs for the same target RNA.

[0150] That is, by using the novel PPR motifs of the present invention in the PPR protein, the specificity for the target RNA can be increased compared with the case of using existing PPR motifs. By using a PPR protein having higher specificity for a target RNA, unintended effects as a result of binding to an unintended RNA can be avoided, when the target RNA is manipulated in a cell using the PPR protein.

[0151] Affinity to a target sequence can be evaluated by conventional methods by those skilled in the art. In RPB-ELISA, by designing an appropriate non-target RNA for an objective PPR protein, and determining binding power for it (luminescence signal value) in the same manner, binding signal value for the target sequence/binding signal value for non-target sequence (S/N) can be determined as an index of specificity (affinity) for the target RNA.

### (Kd Value)

[0152] The PPR protein prepared by using the novel PPR motifs of the present invention can have high affinity (equilibrium dissociation constant, Kd value) for a target RNA.

[0153] The Kd values for a target sequence can be calculated by existing methods such as EMSA. The Kd value used in the present invention refers to a value measured by EMSA under the conditions described in the section of Examples described below, unless especially stated.

[0154] Although the Kd value of a PPR protein prepared by using the novel PPR motifs of the present invention may be considered to depend on the sequence and length of the target, it can be 10⁻⁷ M or smaller, 10⁻⁸ M or smaller, or in the order of 10⁻⁹ M, when the length of the target sequence is 18 bases long or longer. According to the examination of the inventors of the present invention, when the length of the target sequence has 18-base long, the minimum Kd value (high affinity) was 1.95×10⁻⁹ under the conditions of the examples, which is lower than any of the previously reported Kd values of the designed PPR proteins (see Table 1). By the way, it has been revealed that the Kd values correlate with the signal values obtained in the RPB-ELISA binding experiments. It can be estimated that when the RPB-ELISA luminescence value (according to the conditions described in the Examples section) is 1 to 2×10⁷, the Kd value is 10⁻⁶ to 10⁻⁷ M, when the RPB-ELISA luminescence value is 2 to 4×10⁷, the Kd value is 10⁻⁷ to 10⁻⁸ M, and when the RPB-ELISA luminescence value is greater than 4×10⁷, the Kd value is 10⁻⁸ or smaller.

### (PPR Protein Construction Efficiency)

[0155] By using the novel PPR motifs of the present invention, a desired PPR protein can be efficiently constructed. The construction efficiency can be calculated by determining the percentage of successful construction of PPR proteins with high Kd values using existing methods. The construction efficiency can also be calculated by using the luminescence signal value obtained by RPB-ELISA instead of the Kd value in the same manner as described above.

[0156] Specifically, when the length of the target sequence is 18 bases long, by using the novel PPR motif of the present invention, PPR proteins with a Kd value of 10⁻⁶ M or lower (RPB-ELISA value is 1×10⁷ or higher) can be obtained with an efficiency of 50% or higher, more specifically 60% or higher, still more specifically 70% or higher, further specifically 80% or higher. According to the present invention, PPR proteins with a Kd value of 10⁻⁷ M or lower (RPB-ELISA value is 2×10⁷ or higher) for a target sequence of 18 bases long can be obtained with an efficiency of 50% or higher, specifically 55% or higher, more specifically 65% or higher, further specifically 75% or higher. Further, according to the present invention, PPR proteins with a Kd value of 10⁻⁸ M or lower (RPB-ELISA value is 4×10⁷ or higher) for a target sequence of 18 bases long can be obtained with an efficiency of 20% or higher, specifically 25% or higher, more specifically 30% or higher, further specifically 35% or higher.

[0157] The construction efficiency can be calculated on the basis of the ratio of binding signal value to a target sequence/binding signal value to a non-target sequence (S/N) by using the RPB-ELISA method.

[0158] Specifically, by using the novel PPR motifs of the present invention, PPR proteins with an S/N of 10 or higher for a target sequence of 18 bases long can be obtained with an efficiency of 50% or higher, more specifically 55% or higher, still specifically 65% or higher, further specifically 75% or higher. According to the present invention, PPR proteins with an S/N of 100 or higher for a target sequence of 18 bases long can be obtained with an efficiency of 15% or higher, specifically 20% or higher, more specifically 25% or higher, further specifically 30% or higher.

### [Seamless Cloning of PPR Protein Gene Using Parts Library]

[0159] The present invention also provides a method for preparing a gene encoding a protein comprising n of PPR motifs that can bind to a target nucleic acid consisting of a sequence of n bases in length, which comprises the following steps of:

[0160] selecting m of PPR parts required to prepare the objective gene from a library of at least 20×m kinds of PPR parts, which consist of m kinds of intermediate vectors Dest-a, . . . , which are designed so that they can successively bind, and are inserted with at least 20 kinds of polynucleotides including 4 kinds encoding PPR motifs that have adenine, cytosine-, guanine-, uracil- and thymine-binding properties, respectively, and 16 kinds of the same encoding linkage products of two of the PPR motifs, respectively; and

[0161] subjecting the selected m kinds of PPR parts to the Golden Gate reaction together with the vector parts to obtain a vector in which m of polynucleotide linkage products are inserted. n is an integer of m or larger, and is m×2 or smaller. n can be, for example, 10 to 20.

[0162] The method of the present invention utilizes the Golden Gate reaction. In the Golden Gate reaction, multiple DNA fragments are inserted into a vector using a type IIS restriction enzyme and T4 DNA ligase. The type IIS restriction enzyme cleaves a nucleic acid at a position outside the recognition sequence, and therefore the cohesive end can be freely chosen. Further, since it uses 4 bases protruding end for the ligation, it is highly efficient. Furthermore, the recognition sequence does not remain in the construct obtained after annealing and ligation. Therefore, polynucleotides encoding PPR motifs can be seamlessly ligated (FIG. 5). A particularly preferred example of the type IIS restriction enzyme is BsaI.

[0163] The method of the present invention enables efficient preparation of a gene by using a parts library appropriately designed in consideration of the characteristics of the PPR proteins and the Golden Gate reaction, even when the gene contains a large number of repeat sequences. Therefore, this method is useful for preparing a gene of a protein containing 15 or more of PPR motifs that can bind to a target nucleic acid of 15 base length or longer, which requires a larger number of repeat sequences. When m is 10, by selecting 10 of PPR parts necessary for preparing a target gene from a library consisting of 200 PPR parts, a gene encoding a protein containing 10 to 20 PPR motifs can be prepared as desired. In the following descriptions, explanations may be made by exemplifying preparation of a gene encoding an RNA-binding PPR protein whose target sequence has 10 to 20 bases long. However, this method can also be applied to preparation of a PPR protein for a target sequence of a different length, and it can also be applied to preparation of a DNA-binding PPR protein.

[0164] In the method of the present invention, a library of parts comprising one or two sequences encoding a PPR motif is prepared (STEP 1 and STEP 2 in FIG. 5), and used. The parts library can be prepared by, for example, inserting the PPR motif sequences into 10 different intermediate vectors Dest-a, b, c, d, e, f, g, h, i, and j. The intermediate vectors are designed so that Dest-a to Dest-j are successively and seamlessly ligated by the Golden Gate reaction. The PPR motif sequences to be inserted may consist of at least 20 kinds of sequences including 4 kinds encoding each base (A, C, G, and U) and 16 kinds encoding each of the ligation products of two of the PPR motifs (AA, AC, AG, AU, CA, CC, CG, CU, GA, GC, GG, GU, UA, UC, UG, and UU). In this case, the parts library comprises at least 200 types of parts.

[0165] Then, necessary parts are selected according to the target nucleotide sequence. Specifically, for example, one part each is selected from each of the Dest-a, b, c, d, e, f, g, h, i, and j parts libraries, and subjected to the Golden Gate reaction together with the vector parts (STEP 3 in FIG. 5). If an intermediate vector containing 1 motif is selected for all the intermediate vectors, 10 sequences are ligated, or if intermediate vectors containing 2 motifs are used, 20 sequences are ligated. When it is desired to link 11 to 19 sequences, 1 motif can be selected from each of any Dest-x libraries.

[0166] The vector parts to be used in STEP 3 can be selected from three types of CAP-x vectors (consideration for the ii-th amino acid in the PPR motif closest to the C-terminus is required, but the ii-th amino acids of the guanine-binding PPR motif and the uracil-binding PPR motif are identical, see Non-patent document 1 mentioned above). If the base recognized by the motif closest to the C-terminus is adenine, CAP-A can be used, if it is cytosine, CAP-C can be used, and if it is guanine or uracil, CAP-GU can be used.

[0167] The resulting plasmids can be transformed into E. coli, then amplified and extracted.

### [Method for Detection or Analysis of PPR Protein]

[0168] The present invention provides a method for detecting or quantifying a protein comprising n of PPR motifs that can bind to a target nucleic acid consisting of a sequence of n bases in length, which comprises the following steps:

[0169] the step of adding a solution containing a candidate protein to a solid-phased target nucleic acid, and detecting or quantifying the protein that bound to the target nucleic acid.

[0170] This detection or analysis method of the present invention is useful as a high throughput method for evaluating binding performance of PPR proteins.

[0171] Since the detection or analysis method of the present invention is based on the application of ELISA (Enzyme-Linked Immuno Sorbent Assay) (FIG. 7A), it may be referred to as RPB-ELISA (RNA-protein binding ELISA) method. Although the method is described herein as a method for evaluating RNA-binding PPR proteins, it can also be applied to evaluation of the binding performance of DNA-binding PPR proteins to a target DNA.

[0172] The step of adding a solution containing a candidate protein to a solid-phased target nucleic acid can be specifically carried out by flowing a solution containing the objective binding protein on the target nucleic acid molecule immobilized on a plate. Immobilization of the target nucleic acid molecule can be achieved by using various existing immobilization methods, such as by providing a nucleic acid probe containing a biotin-modified target nucleic acid molecule to a streptavidin-coated well plate.

[0173] On the other hand, the candidate protein to be measured can be fused with a marker protein, for example, an enzyme such as luciferase or a fluorescent protein. The fusion with the marker protein makes the detection and quantification easier.

[0174] The RPB-ELISA method has an advantage that it does not require special equipment such as Biacore. In addition, the RPB-ELISA method provides high throughput, and enables evaluation of binding between protein and nucleic acid in a short time. Furthermore, the RPB-ELISA method has an advantage that it enables sufficient detection at a protein concentration of 6.25 nM or higher under the conditions used in the examples, and similarly enables detection also with E. coli lysates, and therefore it does not require purification of the target nucleic acid-binding protein.

### [Use of PPR Protein]

### (Complex and Fusion Protein)

[0175] The PPR motif or PPR protein provided by the present invention can be made into a complex by binding a functional region. The PPR motif or PPR protein can also be linked with a proteinaceous functional region to form a fusion protein. The functional region refers to a part having such a function as a specific biological function exerted in a living body or cell, for example, enzymatic function, catalytic function, inhibitory function, promotion function, etc, or a function as a marker. Such a region consists of, for example, a protein, peptide, nucleic acid, physiologically active substance, or drug. In the following explanations, the complex of the present invention may be explained with reference to a fusion protein as an example, but those skilled in the art may also understand complexes other than fusion protein according to the explanations.

[0176] In one of the preferred embodiments, the functional region is a ribonuclease (RNase). Examples of RNase are RNase A (e.g., bovine pancreatic ribonuclease A, PDB 2AAS), and RNase H.

[0177] In one of the preferred embodiments, the functional region is a fluorescent protein. Examples of fluorescent protein are mCherry, EGFP, GFP, Sirius, EBFP, ECFP, mTurquoise, TagCFP, AmCyan, mTFP1, MidoriishiCyan, CFP, TurboGFP, AcGFP, TagGFP, Azami-Green, ZsGreen, EmGFP, HyPer, TagYFP, EYFP, Venus, YFP, PhiYFP, PhiYFP-m, TurboYFP, ZsYellow, mBanana, KusabiraOrange, mOrange, TurboRFP, DsRed-Express, DsRed2, TagRFP, DsRed-Monomer, AsRed2, mStrawberry, TurboFP602, mRFP1, JRed, KillerRed, HcRed, KeimaRed, mRasberry, mPlum, PS-CFP, Dendra2, Kaede, EosFP, and KikumeGR. A preferred example is mClover3 in view of improvement of aggregation and/or efficient localization to the nuclei as a fusion protein.

[0178] In one of the preferred embodiments, when the target is mRNA, the functional region is a functional domain that enhances expression amount of a protein from the target mRNA (WO2017/209122). The functional domain that enhances expression amount of a protein from mRNA may be, for example, all or a functional part of a functional domain of a protein known to directly or indirectly promote translation of mRNA. More specifically, it may be a domain that directs ribosomes to mRNA, domain associated with initiating or promoting translation of mRNA, domain associated with transporting mRNA out of the nucleus, domain associated with binding to the endoplasmic reticulum membrane, domain containing an endoplasmic reticulum (ER) retention signal sequence, or domain containing an endoplasmic reticulum signal sequence. More specifically, the domain that directs ribosomes to mRNA mentioned above may be a domain comprising all or a functional part of a polypeptide selected from the group consisting of density-regulated protein (DENR), malignant T-cell amplified sequence 1 (MCT-1), transcriptionally-controlled tumor protein (TPT1), and Lerepo4 (zinc finger CCCH-domain). The domain associated with translation initiation or translation promotion of mRNA mentioned above may be a domain comprising all or a functional part of a polypeptide selected from the group consisting of eIF4E and eIF4G. The domain associated with transporting mRNA out of the nucleus mentioned above may be a domain containing all or a functional part of stem-loop binding protein (SLBP). The domain associated with binding to the endoplasmic reticulum membrane mentioned above may be a domain comprising all or a functional part of a polypeptide selected from the group consisting of SEC61B, translocation associated protein alpha (TRAP-alpha), SR-alpha, Dial (cytochrome b5 reductase 3), and p180. The endoplasmic reticulum retention signal (ER retention signal) sequence mentioned above may be a signal sequence comprising the KDEL (KEEL) sequence. The endoplasmic reticulum signal sequence mentioned above may be a signal sequence including MGWSCIILFLVATATGAHS.

[0179] In the present invention, the functional region may be fused to the PPR protein on the N-terminal side or the C-terminal side, or on both the N-terminal side and the C-terminal side. The complex or fusion protein may include a plurality of functional regions (e.g., 2 to 5). Further, the complex or fusion protein according to the present invention may consist of the functional region and PPR protein indirectly fused via a linker or the like.

### (Nucleic Acid Encoding PPR Protein Etc., Vector, and Cell)

[0180] The present invention also provides a nucleic acid encoding the PPR motif, PPR protein or fusion protein mentioned above, and a vector containing such a nucleic acid (e.g., vector for amplification, and expression vector). As the host of the vector for amplification, E. coli or yeast may be used. In this description, expression vector means a vector containing, for example, a DNA having a promoter sequence, DNA encoding a desired protein, and DNA having a terminator sequence from the upstream side, but they need not necessarily be arranged in this order, so long as the desired function is exerted. In the present invention, recombinant vectors prepared by using various vectors that may be normally used by those skilled in the art may be used.

[0181] The PPR protein or fusion protein of the present invention can function in eukaryotic (e.g., animal, plant, microbe (yeast, etc.), and protozoan) cells. The fusion protein of the present invention can function, in particular, in animal cells (in vitro or in vivo). Examples of animal cells into which the PPR protein or fusion protein of the present invention, or a vector expressing it can be introduced include, for example, cells derived from humans, monkeys, pigs, cows, horses, dogs, cats, mice, and rats. Examples of cultured cells into which the PPR protein or fusion protein of the present invention or a vector expressing it can be introduced include, for example, Chinese hamster ovary (CHO) cells, COS-1 cells, COS-7 cells, VERO (ATCC CCL-81) cells, BHK cells, canine kidney-derived MDCK cells, hamster AV-12-664 cells, HeLa cells, WI38 cells, 293 cells, 293T cells, and PER.C6 cells, but not limited to these.

### (Use)

[0182] With the PPR protein or fusion protein of the present invention, a functional region may be delivered to the inside of a living body or cells and made to function in a nucleic acid sequence-specific manner. A complex linked with a marker such as GFP may be used to visualize a desired RNA in a living body.

[0183] With the PPR protein or fusion protein of the present invention, a nucleic acid can be modified or disrupted in a nucleic acid sequence-specific manner in the inside of cells or living bodies, and a new function may be conferred. In particular, RNA-binding PPR proteins are involved in all the RNA processing steps found in the organelles, such as cleavage, RNA edition, translation, splicing, and RNA stabilization. Accordingly, such uses of the method concerning modification of PPR proteins provided by the present invention, as well as the PPR motif and PPR protein provided by the present invention as mentioned below can be expected in a variety of fields.

### (1) Medical Care

[0184] Creation of a PPR protein that recognizes and binds to a specific RNA associated with a specific disease. Analysis of a target sequence and associated proteins for a specific RNA. The results of the analysis can be used to identify compounds for the treatment of the disease.

[0185] For example, it is known that, in animals, abnormalities in the PPR protein identified as LRPPRC cause Leigh syndrome, French Canadian type (LSFC, Leigh syndrome, subacute necrotizing encephalomyelopathy). The present invention may contribute to the treatment (prevention, therapeutic treatment, or inhibition of progression) of LSFC. Many of the existing PPR proteins work to specify edition sites for RNA manipulation (conversion of genetic information on RNA, often C to U). The PPR proteins of this type have an additional motif that is suggested to interact with RNA editing enzymes on the C-terminal side. PPR proteins having this structure are expected to enable introduction of base polymorphism or treatment of a disease or condition caused by base polymorphism.
[0186] Creation of cells with controlled RNA repression/expression. Such cells include stem cells of which differentiation or undifferentiation state is monitored (e.g., iPS cells), model cells for evaluation of cosmetics, and cells in which the expression of functional RNA can be turned on or off for the purpose of elucidating action mechanism and pharmacological testing for drug discovery.
[0187] Preparation of a PPR protein that specifically binds to a specific RNA associated with a particular disease. Such a PPR protein is introduced into a cell using a plasmid, virus vector, mRNA, or purified protein, and an RNA function that causes a disease can be changed (improved) by binding of the PPR protein to the target RNA in the cell. Examples of the mechanism of changing the function include, for example, change of the RNA structure by binding, knockdown by decomposition, change of the splicing reaction by splicing, base substitution, and so forth.

### (2) Agriculture, Forestry and Fishery

[0188] Improvement of yield and quality of crops, forest products and marine products.
[0189] Breeding of organisms with improved disease resistance, improved environmental tolerance, or improved or new function.

[0190] For example, concerning hybrid firstgeneration (F1) plant crops, an F1 plant may be artificially created by using stabilization of mitochondrial RNA and translation control by PPR proteins so that yield and quality of the crops may be improved. RNA manipulation and genome edition using PPR proteins more accurately and quickly enable variety improvement and breeding (genetic improvement of organisms) of organisms compared with conventional techniques. In addition, it can be said that RNA manipulation and genome editing using PPR proteins are similar to the classical breeding methods such as selection of mutants and backcrossing, since they do not transform traits with a foreign gene as in genetic recombination, but they are techniques using RNA and genomes originally possessed by plants and animals. Therefore, they can also surely and quickly cope with global-scale food and environmental problems.

### (3) Chemistry

[0191] Control of protein expression amount by manipulating DNA and RNA in the production of useful substances using microorganisms, cultured cells, plant bodies, and animal bodies (e.g., insect bodies). Productivity of useful substances can be thereby improved. Examples of the useful substances are proteinaceous substances such as antibodies, vaccines, and enzymes, as well as relatively low-molecular weight compounds such as pharmaceutical intermediates, fragrances, and dyes.
[0192] Improvement of production efficiency of biofuel by modification of metabolic pathways of algae and microorganisms.

### EXAMPLES

### Example 1: Establishment of Method for Preparing PPR Gene

[0193] (Design of motif)

[0194] First, PPR motifs were designed. For the PPR motif sequences used in the artificial PPR proteins reported so far, consensus sequences of naturally occurring PPR motif sequences extracted by various methods were used. Among them, PPR proteins made from the motif sequence of dPPR (Non-patent documents 2, 3, and 6 mentioned above) have a low Kd value (high affinity). This PPR motif sequence is hereinafter referred to as v1 PPR motif

[0195] As for the other PPR motif sequences, there were prepared consensus sequences by using only PPR motifs containing representative combinations of 1st, 4th, and ii-nd amino acid that recognize each base. Specifically, the representative amino acid combinations that recognize each base are: combination of first valine, fourth threonine, and ii-th asparagine that recognizes adenine, combination of first valine, fourth asparagine, and ii-th serine that recognizes cytosine, combination of first valine, fourth threonine, and ii-th aspartic acid that recognizes guanine, and combination of first valine, fourth asparagine, and ii-th aspartic acid that recognizes uracil, therefore consensus amino acid sequences were extracted from the PPR motif sequences containing those combinations of the first, fourth, and ii-th amino acids, and these sequence were used as PPR motif sequences that specifically recognizes adenine, cytosine, guanine, and uracil, respectively (FIGS. 1 to 4, SEQ ID NOS: 9 to 12). These motifs will be henceforth referred to as v2 PPR motifs. The same combinations of 1st, 4th, and ii-th amino acids were also used for the v1 PPR motifs (SEQ ID NOS: 13 to 16).

### (Seamless Cloning Using One- and Two-Motif Libraries)

[0196] A cloning method for seamlessly ligating these designed PPR motif sequences was constructed (FIG. 5). The cloning is performed through three steps. In STEP 1, the motif sequences are designed and prepared. In STEP 2, plasmid libraries in which one or two motifs are cloned are prepared. In STEP 3, required number of the motifs are ligated to complete a target PPR gene.

[0197] First, plasmids in which one PPR motif sequence (numbers 4 to ii) was cloned were prepared (STEP 1). The plasmids of STEP 1 contained PPR motif sequences recognizing A, C, G, and U, respectively. In the following STEP 2, DNA fragments containing the PPR motif sequence in the plasmids of STEP 1 were cloned into an intermediate vector (Dest-x, the sequence thereof is shown below). The plasmids of STEP 1 that enable insertion of one motifs were designated as P1a-vx-X, and as for the plasmids that enable insertion of two motifs, those of the N-terminus side were designated as P2a-vx-X, and those of C-terminus side as P2b-vx-X (vx is v1 or v2, and X is A, C, G, or U). For cloning into Dest-x, the BsaI restriction enzyme site (BsaI restriction enzyme recognizes and cleaves the sequence GGTCTCnXXXX (SEQ ID NO: 17), where the XXXX portion constitutes a four bases protruding end (henceforth referred to as tag sequence). The sequences to be seamlessly ligated were designed as follows.

[0198] There were prepared nucleotide sequences comprising each motif sequence, and the following sequences ligated on the 5′ and 3′ sides of the motif sequence: ggtctcaatac (SEQ ID NO: 18), and gtggtgagacc (SEQ ID NO: 19) in the case of Pla, ggtctcaatac (SEQ ID NO: 18 mentioned above), and gtggtcacatatgagacc (SEQ ID NO: 20) in the case of P2a, or ggtctcacatac (SEQ ID NO: 21), and gtggtgagacc (SEQ ID NO: 19 mentioned above) in the case of P2b, by a gene synthesis technique, and they were cloned into pUC57-amp.

[0199] There were 10 types of Dest-x (Dest-a, b, c, d, e, f, g, h, i, and j), and the sequences thereof were designed so that Dest-a to Dest-j could be seamlessly ligated in that order.

There were prepared gaagacataaactccgtggtcacATACagagaccaaggtctcaGTGGtcacatacatgtcttc (SEQ ID NO: 1) as Dest-a, gaagacatATACagagaccaaggtctcaGTGGtgacataatgtcttc (SEQ ID NO: 22) as Dest-b, gaagacatcATACagagaccaaggtctcaGTGGttacatatgtcttc (SEQ ID NO: 23) as Dest-c, gaagacatacATACagagaccaaggtctcaGTGGttacaatgtcttc (SEQ ID NO: 24) as Dest-d, gaagacattacATACagagaccaaggtctcaGTGGtgacatgtcttc (SEQ ID NO: 25) as Dest-e, gaagacattgacATACagagaccaaggtctcaGTGGttaatgtcttc (SEQ ID NO: 26) as Dest-f, gaagacatgttacATACagagaccaaggtctcaGTGGtcatgtcttc (SEQ ID NO: 27) as Dest-g, gaagacatggtcacATACagagaccaaggtctcaGTGGtatgtcttc (SEQ ID NO: 28) as Dest-h, gaagacattggttacATACagagaccaaggtctcaGTGGatgtcttc (SEQ ID NO: 29) as Dest-i, and gaagacatgtggtgacATACagagaccaaggtctcaGTGGtcttc (SEQ ID NO: 30) as Dest-j by a gene synthesis technique, and cloned into pUC57-kan.

[0200] Plasmids consisting of each Dest-x into which PPR motif corresponding to A, C, G, or U, or two PPR motifs that recognizes each of the base combination of AA, AC, AG, AU, CA, CC, CG, CU, GA, GC, GG, GU, UA, UC, UG, and UU were inserted were prepared for all of Dest-x to prepare plasmid libraries of STEP 1 for v1 and v2 (each comprises 200 types). In each of the combinations mentioned above, 40 ng of Pla plasmid alone, or 40 ng of P2a plasmid and 40 ng of P2b plasmid were combined with 0.2 μL of 10× ligase buffer (NEB, B0202S), 0.1 μL of BsaI (NEB, R0535S), and 0.1 μL of Quick ligase (NEB, M2200S), and the total volume was adjusted to 1.9 μL with sterile water. Reactions were allowed at 37° C. for 5 minutes and 16° C. for 5 minutes, which were alternately repeated for 5 cycles, in a thermal cycler (Biorad, 1861096J1). Further, 0.1 μL of 10x Cut smart buffer (NEB, B7204) and 0.1 μL of BsaI (NEB, R0535S) were added, and reactions were allowed at 37° C. for 60 minutes and 80° C. for 10 minutes. XL1-blue was transformed with 2.5 μL of the reaction solution, and selected in the LB medium containing 30 μg/ml of kanamycin. Insertion of the desired sequences was confirmed by sequencing.

[0201] In STEP 3, Dest-a to Dest-j were selected according to the target sequence, and cloned into the CAP-x vector (Non-patent document 1 mentioned above). If those each containing one motif are used for all the intermediate vectors, 10 motifs are ligated, and if those containing two motifs each are used, 20 motifs are ligated. A plasmid comprising 11 to 19 motifs can be obtained by using Dest-x containing one motif at any position. For example, when an 18-motif PPR sequence is prepared, Dest-a and Dest-b containing one motif in, and the other plasmids containing two motifs are used.

[0202] The intermediate vectors used in the cloning of STEP 3 should be selected from three types of vectors. There were used CAP-A when the nucleotide to be recognized by the motif nearest to the C-terminus is adenine; CAP-C, when the same is cytosine; and CAP-GU, when the same is guanine or uracil. They were designed so that the amino acid sequence MGNSV (SEQ ID NO: 31) was added on the N-terminus side of the PPR repeat, and ELTYNTLISGLGKAGRARDPPV (SEQ ID NO: 32) was added on the C-terminus side of the PPR repeat as a result of the cloning of them into the intermediate vectors for STEP 3.

[0203] Each of 10 kinds of the intermediate plasmids in an amount of 20 ng, 1 μL of 10× ligase buffer (NEB, B0202S), 0.5 μL of BpiL (Thermo, ER1012), and 0.5 μL of Quick ligase (NEB, M2200S) were combined, and the final volume was adjusted to 10 μl with sterile water. Reactions were allowed at 37° C. for 5 minutes and 16° C. for 7 minutes for 15 cycles. Further, 0.4 μL of BpiL was added, and reactions were allowed at 37° C. for 30 minutes and 75° C. for 6 minutes. Subsequently, 0.34 of 1 mM ATP and 0.15 μl of Plasmid safe nuclease (Epicentre, E3110K) were added, and reaction was allowed at 37° C. for 15 minutes. E. coli (competent cells of XL-1 Blue strain, Nippon Gene) was transformed with 3.5 μl of the reaction solution, and cultured in the LB medium containing 100 μg/mL spectinomycin at 37° C. for 16 hours for selection. A portion of the generated colonies was used to amplify the inserted gene region using primers pCR8_Fw: 5′-TTGATGCCTGGCAGTTCCCT-3′ (SEQ ID NO: 33) and pCR8_Rv: 5′-CGAACCGAACAGGCTTATGT-3′ (SEQ ID NO: 34). To a 0.2-mL tube, 5 μL 2×Go-taq (Promega, M7123), 1.5 μl of 10 μM pCR8_Fw, 1.5 μl of 10 μM pCR8_Rv, and 24 of sterile water were added, and reaction was allowed at 98° C. for 2 minutes, followed by 15 cycles of 98° C. for 5 seconds, 55° C. for 10 seconds, and 72° C. for 2.5 minutes in a thermal cycler to carry out the DNA amplification reaction. A portion of the reaction solution was electrophoresed by using MultiNA (SHIMADZU, MCE202) to confirm the size of the inserted DNA fragment. By using v1 and v2 motifs, three clones were prepare for each of the three kinds of 18-motif PPR proteins (PPR1, PPR2, and PPR3, SEQ ID NOS: 35 to 37 and, 40 to 42) (v1_PPR1, v1_PPR2, v1_PPR3, v2_PPR1, v2_PPR2, and v2_PPR3), of which results are shown in FIG. 6B. With v1, bands of correct size were obtained except for the second clone of PPR2. With v2, bands of correct size were obtained for all the clones. In addition, the sequences of them were confirmed by sequencing. These results indicate that the PPR protein genes can be efficiently constructed by cloning according to this method.

### Example 2: Construction of High Throughput Binding Performance Evaluation System for RNA-Binding Protein

[0204] In general, evaluation of binding between a nucleic acid-binding protein and a nucleic acid molecule is performed by a method using EMSA or Biacore. EMSA (Electrophoretic Mobility Shift Assay) is a method utilizing the property that when a sample of a protein and a nucleic acid bound together is electrophoresed, mobility of the nucleic acid molecule changes compared with that of the molecule not bound. This method has drawbacks that it requires purified protein, operation is complicated, and it cannot analyze a large number of samples at one time. Molecular interaction analyzers, of which typical example is Biacore, enable reaction kinetics analyses, and therefore allow detailed protein-nucleic acid binding analysis. However, they also require purified protein and special equipment. Therefore, the inventors thought of a method that enables evaluation of protein-nucleic acid binding in a short time with high throughput.

[0205] ELISA (Enzyme-Linked Immuno Sorbent Assay) is generally used to analyze binding of antibody (protein) and protein. In this method, a primary antibody is fixed on a well plate, to which a solution containing a protein to be detected is added, and after washing, a secondary antibody detectable with color development or luminescence is added, and quantified in order to detect the amount of the remaining protein as the object of the analysis. By applying this method, the inventors devised a system, in which a nucleic acid molecule is fixed on a plate, a solution containing an objective nucleic acid-binding protein is poured onto the plate, and the amount of bound protein is quantified (FIG. 7A). The nucleic acid to be analyzed is fixed by adding a nucleic acid probe consisting of the nucleic acid having a biotin-modified end to a streptavidin-coated well plate. By fusing the nucleic acid-binding protein to be analyzed to luciferase or fluorescent protein, detection can be made easier. In addition, the protein to be measured may not necessarily be purified, and the analysis can be performed by using a crude extract of cells, in which the nucleic acid-binding protein to be measured is expressed (cultured animal cells, yeast, E. coli, etc.), and the time for purification can be thereby shortened (FIG. 7B). This method used for measuring binding of RNA and RNA-binding protein is henceforth referred to as RPB-ELISA (RNA-protein binding ELISA).

[0206] To establish the experiment system, a recombinant MS2 protein and an RNA probe that binds to it were prepared. A gene for the MS2 protein fused with luciferase protein on the N-terminus side and 6× histidine tag on the C-terminus side was prepared by gene synthesis, and cloned into the pET21b vector (NL_MS 2_HIS, SEQ ID NO: 357). As the RNA probe, a target sequence containing the MS2 binding sequence (RNA_4, SEQ ID NO: 64) and a non-target sequence not containing the MS2 binding sequence (RNA_51, SEQ ID NO: 247), each of which had 5′-end modified by biotinylation, were synthesized (Greiner). The Rosetta (DE3) strain of E. coli was transformed with the MS2 protein expression plasmid, and cultured overnight at 37° C. in 2 mL of the LB medium containing 100 μg/mL ampicillin. Then, 2 mL of the culture medium was added to 300 mL of the LB medium containing 100 μg/mL ampicillin, and cultured at 37° C. until OD₆₀₀ reached 0.5 to 0.8. After the temperature of the medium containing the cultured cells was lowered to 15° C., IPTG was added at a final concentration of 0.1 mM, and the culture was further continued for 12 hours. The culture medium was centrifuged at 5000×g and 4° C. for 10 minutes to collect the cells, 5 mL of a lysis buffer (20 mM Tris-HCl, pH 8.0, 150 mM NaCl, 0.5% NP-40, 1 mM DTT, 1 mM EDTA) was added, the mixture was stirred with a vortex mixer, and the cells were disrupted by sonication. The sonicated mixture was centrifuged at 15,000 rpm and 4° C. for 10 minutes, and the supernatant was collected. Half of the supernatant was stored at −80° C. until use as E. coli lysate, and the rest was affinity-purified using histidine tag and Ni-NTA. First, 200 μl of Ni-NTA agarose beads (Qiagen, Cat. No. 30230) were spun down, and the beads were collected. The beads were equilibrated by adding 100 μL of a washing buffer, and stirring the mixture on a rotator at 4° C. for 1 hour. The entire volume of the equilibrated beads was mixed with the protein solution, and reaction was allowed at 4° C. for 1 hour. Then, the beads were collected by centrifugation at 2,000 rpm for 2 minutes, and washed with 10 ml of a washing buffer (20 mM Tris-HCl, pH 8.0, 500 mM NaCl, 0.5% NP-40, 10 mM imidazole) to remove factors that nonspecifically bound to the beads. Elution was performed with 60 μL of an elution buffer (20 mM Tris-HCl, pH 8.0, 500 mM NaCl, 0.5% NP-40, 500 mM imidazole). Purification degree was confirmed by SDS-PAGE. The eluate was dialyzed overnight at 4° C. against 20 mM Tris-HCl, pH 8.0, 150 mM NaCl, 0.5% NP-40, 1 mM DTT, 1 mM EDTA.

[0207] The luciferase luminescences of the E. coli lysate and the purified MS2 protein solution were measured. To a 96-well white plate, 40 μL of luciferase substrate (Promega, E151A) diluted 2500-fold with a luminescence buffer (20 mM Tris-HCl, pH 7.6, 150 mM NaCl, 5 mM MgCl₂, 0.5% NP-40, 1 mM DTT), and 40 μL of the E. coli lysate or 40 μL of the purified MS2 protein solution were added, and allowed to react for 5 minutes, after which the luminescence was measured with a plate reader (PerkinElmer, 5103-35). On the basis of the obtained luminescences, they were diluted with a lysis buffer (20 mM Tris-HCl, pH 7.6, 150 mM NaCl, 5 mM MgCl₂, 0.5% NP-40, 1 mM DTT, 0.1% BSA) to obtain dilution products of 0.01×10⁸, 0.02×10⁸, 0.09×10⁸, 0.38×10⁸, 1.50×10⁸, and 6.00×10⁸ LU/μL.

[0208] To a 96-well streptavidin-coated white plate (Thermo fisher, 15502), 2.5 pmol of the biotinylated RNA probe was added, reaction was allowed at room temperature for 30 minutes, and the plate was washed with the lysis buffer. For the background measurement, wells to which the biotinylated RNA was not added, but the lysis buffer was added (-Probe) were also prepared. Then, a blocking buffer (20 mM Tris-HCl, pH 7.6, 150 mM NaCl, 5 mM MgCl₂, 0.5% NP-40, 1 mM DTT, 1% BSA) was added, and the plate surface was blocked at room temperature for 30 minutes. Then, 100 μL of the E. coli lysate or purified protein solution diluted above was added to each well, and the binding reaction was allowed at room temperature for 30 minutes. Then, the wells were washed 5 times with 200 μL of a washing buffer (20 mM Tris-HCl, pH 7.6, 150 mM NaCl, 5 mM MgCl₂, 0.5% NP-40, 1 mM DTT). To each well, 40 μL of the luciferase substrate (Promega, E151A) diluted 2,500-fold with the washing buffer was added, reaction was allowed for 5 minutes, and then the luminescence was measured with a plate reader (PerkinElmer, 5103-35).

[0209] The background (luminescence signal value obtained with adding the PPR protein and without adding RNA) was subtracted from the luminescences of the samples to which a solution containing each of the RNA and MS2 protein was added, and the obtained values were used as the binding powers between the MS2 protein and RNA.

[0210] The results are shown in FIG. 7C. Specific binding of the MS2 protein to the target RNA (Target seq.) was detected for both the purified protein solution (Purified protein) and E. coli lysate (Lysate). The luminescence of 6.0×10⁸ LU/μL corresponds to 100 nM purified MS2 protein, and therefore it was found that detection can be sufficiently attained with a protein concentration of 6.25 nM (0.38×10⁸ LU/4) or higher. Furthermore, the detection was also possible with the E. coli lysate, and therefore it was found that purification of the protein is not required.

### Example 3: RNA Binding Performance Comparison Experiment for 18-Motif PPR Proteins Prepared by Using Existing or Novel PPR Motif Sequences

[0211] In order to evaluate the RNA-binding performance of the PPR proteins prepared by using v1 or v2 PPR motifs, recombinant proteins were prepared in E. coli, and the binding performance thereof was evaluated by using RPB-ELISA. For the comparison, 5 kinds of target sequences (T_1, T_2, T_3, T_4, and T_5, SEQ ID NOS: 46 to 50) were determined, PPR proteins binding to each of them were designed, and genes encoding them were prepared (v1_PPR1, v1_PPR2, v1_PPR3, v1_PPR4, v1_PPR5, v2_PPR 1, v2_PPR2, v2_PPR3, v2_PPR4, and v2_PPR5, SEQ ID NOS: 35 to 39, and 40 to 45). To each prepared PPR gene, the luciferase protein gene was added on the N-terminus side, and a his-tag sequence was added on the C-terminus side, and they were cloned into the pET21 vector (NL_v1_PPR1, NL_v1_PPR2, NL_v1_PPR3, NL_v1_PPR4, NL_v1_PPR5, NL_v2_PPR1, NL_v2_PPR2, NL_v2_PPR3, NL_v2_PPR4, and NL_v2_PPR5, SEQ ID NOS: 51 to 60). The Rosetta (DE3) strain was transformed with the PPR expression plasmids. The E. coli was cultured in 2 mL of the LB medium containing 100 μg/mL ampicillin at 37° C. for 12 hours. When OD₆₀₀ reached 0.5 to 0.8, the culture medium was transferred to an incubator at 15° C., and left standing for 30 minutes. Then, 100 μL of an IPTG solution was added (IPTG final concentration, 0.1 mM), and the culture was further continued at 15° C. for 16 hours. An E. coli pellet was collected by centrifugation at 5,000×g and 4° C. for 10 minutes, 1.5 mL of a lysis buffer (20 mM Tris-HCl, pH 8.0, 150 mM NaCl, 0.5% NP-40, 1 mM MgCl₂, 2 mg/mL lysozyme, 1 mM PMSF, 2 μL of 10 mg/mL DNase) was added to the pellet, and the mixture was frozen at −80° C. for 20 minutes. The cells were cryodisrupted with permeabilization at 25° C. for 30 minutes. The disrupted cell mixture was then centrifuged at 3,700 rpm and 4° C. for 15 minutes, and the supernatant containing soluble PPR protein (E. coli lysate) was collected.

[0212] RNA probes consisting of a designed 30-base sequence containing 18 bases of the target sequence and modified by biotinylation at the 5′ end (RNA_1, RNA_2, RNA_3, RNA_4, and RNA_5, SEQ ID NOS: 61 to 65) were synthesized (Grainer). To a streptavidin-coated plate (Thermo fisher), the 5′-end biotinylated RNA probes were added, reaction was allowed at room temperature for 30 minutes, and the plate was washed with a lysis buffer (20 mM Tris-HCl, pH 7.6, 150 mM NaCl, 5 mM MgCl₂, 0.5% NP-40, 1 mM DTT, 0.1% BSA). For background measurement, wells to which RNA was not added, but 100 μL of the lysis buffer, 1 μL of 100 mM DTT, and 1 μL of 40 unit/4 RNase inhibitor (Takara, 2313A) were added were also prepared. Then, 200 μL of a blocking buffer (20 mM Tris-HCl, pH 7.6, 150 mM NaCl, 5 mM MgCl₂, 0.5% NP-40, 1 mM DTT, 1% BSA) was added, and the plate surface was blocked at room temperature for 30 minutes. Then, 100 μL of E. coli lysate containing luciferase-fused PPR protein having a luminescence level of 1.5×10⁸ LU/μL was added to each well, and the binding reaction was allowed at room temperature for 30 minutes. The well was washed 5 times with 200 μL of a washing buffer (20 mM Tris-HCl, pH 7.6, 150 mM NaCl, 5 mM MgCl₂, 0.5% NP-40, 1 mM DTT). To each well, 40 μL of luciferase substrate (Promega, E151A) diluted 2,500-fold with the washing buffer was added, reaction was allowed for 5 minutes, and then luminescence was measured with a plate reader (PerkinElmer, 5103-35). The background (luminescence signal value obtained with adding the PPR protein and without adding RNA) was subtracted from the luminescences of the samples to which a solution containing each RNA and PPR protein was added, and the obtained values were used as the binding powers between the PPR protein and RNA.

[0213] The results are shown in FIG. 8. All of those prepared with the motif sequence v2 showed increase (1.3- to 3.6-fold) in binding power to the target sequence compared with those prepared with the motif sequence v1. In addition, 2 kinds of RNA probes having a non-target sequence (off target 1 and off target 2) (SEQ ID NOS: 66 and 69) were prepared, and binding of the proteins to them was examined. As a result, all of those prepared with v2 showed a higher target binding signal/non-target binding signal (S/N) ratio compared with those prepared with v1 (FIG. 8, upper left), and therefore it was found that v2 shows higher affinity and specificity to the target compared with v1.

### Example 4: Detailed Analysis of RNA Binding Performance of PPR Proteins Prepared with v2 Motif

### (Specificity Evaluation)

[0214] By using the v2 motif, PPR proteins for 23 kinds of target sequences (T_1 to T_3, and T_5 to T_24, SEQ ID NOS: 46 to 48 and 51 to 69) were prepared (NL_v2_PPR1 to 3, and NL_v2_PPR5 to 24, SEQ ID NOS: 56 to 58 and 70 to 88), and RPB-ELISA was used to analyze bindings of all the combinations. The experimental method was the same as that used in Example 3.

[0215] The results are shown in FIG. 9 (upper part). It was found that the binding power to the target was strongest in the 21 kinds of PPR proteins, except for v2_17 and v2_24. These results indicate that PPR proteins can be stably prepared by using the v2 motif, and their binding specificity is high.

[0216] By using the V3.1 motif, PPR proteins for the same 23 kinds of target sequences were similarly prepared (SEQ ID NOS: 411 to 433 for the nucleotide sequences, and SEQ ID NOS: 434 to 456 for the amino acid sequences), and bindings of all the combinations were analyzed by using RPB-ELISA. The experimental method was the same as that used in Example 3.

[0217] The results are shown in FIG. 9 (lower part), and the table shown below. Those showing improved binding power compared with V2 were obtained.

TABLE 9

| | Binding | | | | No. of | | | |
|---|---|---|---|---|---|---|---|---|
| Tar- | acitivity | | | | base | | | |
| get | (Target) | | v3.1/ | Target | in seq. | | | |
| No. | v2 | v3.1 | v2 | sequence | A | U | G | C |
| 6 | 1.7.E+07 | 6.1.E+06 | 0.4 | CAACAUCAG | 7 | 4 | 3 | 4 |
| | | | | UCUGAUAAG | | | | |
| 7 | 1.9.E+07 | 3.4.E+07 | 1.3 | CACAAUGUG | 5 | 2 | 6 | 5 |
| | | | | GCCGAGGAC | | | | |
| 1 | 6.6.E+07 | 7.2.E+07 | 1.1 | GAAUGAACU | 5 | 4 | 5 | 4 |
| | | | | CUUCCGGGA | | | | |
| 3 | 1.2.E+07 | 4.9.E+07 | 4.0 | AAGCCAGUU | 4 | 8 | 3 | 3 |
| | | | | UUCAUUUUG | | | | |
| 9 | 4.7.E+07 | 2.2.E+06 | 0.0 | CACUAUUUA | 7 | 7 | 1 | 3 |
| | | | | AGUUAUCAA | | | | |
| 10 | 7.8.E+06 | 5.8.E+07 | 7.5 | CAAACUUUC | 7 | 6 | 1 | 4 |
| | | | | ACUUUGAAA | | | | |
| 11 | 1.2.E+07 | 2.6.E+07 | 2.2 | GGUGGUGAG | 1 | 3 | 10 | 4 |
| | | | | GCCCUGGGC | | | | |
| 12 | 3.8.E+07 | 1.8.E+07 | 0.5 | GACUCAGGA | 4 | 4 | 5 | 5 |
| | | | | AUCGGCUCU | | | | |
| 13 | 2.3.E+06 | 4.0.E+07 | 17.5 | CAACAUCAA | 9 | 2 | 1 | 6 |
| | | | | AGACACCAU | | | | |
| 14 | 2.5.E+07 | 2.5.E+07 | 1.0 | GUCAGAGGG | 3 | 5 | 7 | 2 |
| | | | | UUCUGGAUU | | | | |
| 3 | 3.3.E+07 | 6.6.E+07 | 2.0 | CUGAGUCAU | 5 | 4 | 3 | 6 |
| | | | | AACCAGCCU | | | | |
| 15 | 1.3.E+07 | 3.2.E+07 | 2.4 | GCAGAUAAU | 10 | 4 | 3 | 1 |
| | | | | UAAUAAGAA | | | | |
| 16 | 2.8.E+07 | 6.3.E+07 | 2.2 | AAGGAUAAU | 10 | 3 | 2 | 3 |
| | | | | AUCAAACAC | | | | |
| 17 | 2.4.E+07 | 3.3.E+07 | 1.4 | UUAUCAGAC | 5 | 7 | 4 | 2 |
| | | | | UGAUGUUGA | | | | |
| 18 | l.l.E+07 | 2.9.E+07 | 2.8 | GGUUAGAGA | 5 | 5 | 7 | 1 |
| | | | | UACAGUGUG | | | | |
| 19 | 1.3.E+07 | 1.3.E+07 | 1.0 | GUGGGGGUG | 4 | 4 | 10 | 0 |
| | | | | GUAGGAAAU | | | | |
| 20 | 1.2.E+07 | 3.6.E+06 | 0.3 | GUGAUGUGG | 4 | 5 | 8 | 1 |
| | | | | AGUUAAGGC | | | | |
| 5 | 6.0.E+07 | 5.6.E+07 | 0.9 | GGCAAAAAG | 8 | 3 | 4 | 3 |
| | | | | AUCACUGUA | | | | |
| 2 | 5.7.E+07 | 4.4.E+07 | 0.8 | GAGAGGAAG | 6 | 6 | 8 | 2 |
| | | | | CCUGAGAGU | | | | |
| 21 | 5.0.E+07 | 4.9.E+06 | 0.1 | GGAAGAGUG | 5 | 3 | 8 | 2 |
| | | | | UCUGGAGCA | | | | |
| 22 | 5.6.E+07 | 5.5.E+07 | 1.0 | UGAUGAUGA | 6 | 6 | 6 | 0 |
| | | | | UGAUGAUGA | | | | |
| 23 | 2.6.E+07 | 5.3.E+07 | 2.0 | UCUUUGCCA | 3 | 8 | 1 | 6 |
| | | | | UUUCCCAUA | | | | |
| 24 | 3.3.E+07 | 5.5.E+07 | 1.7 | CCCAUAGAU | 6 | 3 | 4 | 5 |
| | | | | GUGACAAGC | | | | |

[0218] The RNA binding performances of the PPR proteins shown in FIG. 9 are summarized in the tables shown below in terms of numerical values (log 2 values).

TABLE 10-1

| Target No.: | 6 | 7 | 1 | 8 | 9 | 10 | 11 | 12 | 13 | 14 | 3 | 15 |
|---|---|---|---|---|---|---|---|---|---|---|---|---|
| v2_6 | 23.99 | 16.46 | 17.04 | 6.08 | 16.85 | 16.45 | 15.50 | [symbol] | 17.02 | 16.38 | 18.26 | 16.42 |
| v2_7 | 15.19 | 24.20 | 16.10 | 4.93 | 15.44 | 18.15 | 21.40 | 20.50 | 15.25 | 21.07 | 15.29 | 15.43 |
| v2_1 | 14.38 | 16.64 | 25.98 | 4.68 | 14.50 | 16.74 | 17.23 | 15.93 | 16.03 | 16.17 | 15.55 | 15.88 |
| v2_8 | 15.09 | 15.50 | 15.53 | 3.56 | 14.46 | 16.08 | [symbol] | [symbol] | 15.98 | [symbol] | [symbol] | [symbol] |
| v2_9 | 16.43 | 18.45 | 15.76 | 9.81 | 25.49 | 16.61 | 16.95 | 16.78 | 23.20 | 16.41 | 17.92 | 15.99 |
| v2_10 | 17.13 | 17.16 | 16.90 | 8.02 | 17.36 | 12.89 | 16.78 | 17.20 | 17.19 | 16.54 | 16.84 | 17.00 |
| v2_11 | 17.45 | 18.48 | 18.07 | 7.26 | 17.73 | 17.73 | 23.47 | 17.85 | 17.41 | 18.02 | 17.65 | 17.41 |
| v2_12 | 16.84 | 16.95 | 16.05 | 6.73 | 16.97 | 16.09 | 16.95 | 26.17 | 16.47 | 16.74 | 16.91 | 17.03 |
| v2_13 | 17.73 | 17.78 | 17.70 | 7.47 | 17.68 | 17.85 | 17.64 | 18.01 | 21.13 | 16.09 | 17.28 | 17.37 |
| v2_14 | 17.05 | 19.54 | 17.74 | 7.92 | 17.51 | 17.58 | 18.43 | 17.83 | 17.16 | 24.56 | 17.24 | 17.18 |
| v2_3 | 16.43 | 16.88 | 16.69 | 6.63 | 16.79 | 17.76 | 17.17 | 16.83 | 16.58 | 17.02 | 25.00 | 15.48 |
| v2_15 | 17.94 | 18.37 | 17.90 | 7.77 | 18.22 | 17.29 | 18.38 | 18.45 | 18.07 | 18.07 | 18.22 | 23.67 |
| v2_16 | 18.78 | 21.72 | 18.98 | 8.80 | 19.30 | 18.73 | 19.35 | 19.27 | 18.73 | 18.34 | 18.51 | 18.91 |
| v2_17 | 20.44 | 16.87 | 16.53 | 6.09 | 16.88 | 16.40 | 17.33 | 16.81 | 16.51 | 19.04 | 18.16 | 16.46 |
| v2_18 | 18.40 | 18.66 | 18.22 | 8.23 | 18.58 | 17.73 | 17.08 | 18.60 | 18.42 | 20.37 | 17.27 | 18.60 |
| v2_19 | 16.23 | 16.76 | 17.33 | 6.26 | 16.78 | 16.47 | 21.31 | 16.34 | 16.66 | 16.37 | 16.38 | 16.38 |
| v2_20 | 19.87 | 19.48 | 19.33 | 8.62 | 19.09 | 19.34 | 21.13 | 19.48 | 19.08 | 19.43 | 19.11 | 19.07 |
| v2_5 | 18.27 | 18.67 | 18.05 | 7.93 | 18.42 | 18.06 | 13.34 | 18.17 | 17.96 | 18.04 | 17.97 | 18.30 |
| v2_2 | 16.75 | 24.81 | 17.03 | 6.61 | 16.35 | 17.62 | 17.61 | 17.05 | 16.67 | 18.09 | 18.61 | 18.99 |
| v2_21 | 17.59 | 18.33 | 17.89 | 7.49 | 17.50 | 18.25 | 17.50 | 17.83 | 17.37 | 19.14 | 17.30 | 18.53 |
| v2_22 | 18.10 | 24.73 | 17.89 | 7.49 | 18.32 | 18.14 | 19.47 | 18.25 | 18.12 | 17.48 | 17.53 | 18.21 |
| v2_23 | 17.74 | 18.12 | 17.92 | 7.81 | 18.00 | 17.76 | 19.24 | 18.22 | 17.77 | 18.47 | 18.24 | 17.66 |
| v2_24 | 16.17 | 18.71 | 18.80 | 5.32 | 16.53 | 18.46 | 19.16 | 18.95 | 18.19 | 18.96 | 18.13 | 18.29 |
| Target No.: | 16 | 17 | 18 | 19 | 20 | 5 | 2 | 21 | 22 | 23 | 24 | [symbol] |
| v2_6 | 16.85 | 20.12 | 16.46 | 17.52 | [symbol] | 18.45 | 17.43 | 18.66 | 17.13 | [symbol] | 16.91 | 16.30 |
| v2_7 | 15.13 | 17.78 | 20.58 | 22.81 | 21.79 | 21.33 | 17.58 | 20.34 | 20.55 | 15.25 | 19.22 | [symbol] |
| v2_1 | 14.81 | 15.03 | 14.68 | 19.53 | 14.72 | 16.07 | 18.63 | 15.90 | 16.71 | 15.11 | 15.22 | [symbol] |
| v2_8 | 15.37 | 15.49 | 15.54 | 17.37 | [symbol] | [symbol] | [symbol] | 17.00 | 16.04 | 15.40 | [symbol] | [symbol] |
| v2_9 | 16.36 | 16.82 | 16.68 | 18.61 | 20.49 | 17.08 | 17.02 | 16.66 | 18.05 | 15.65 | 16.24 | [symbol] |
| v2_10 | 16.96 | 17.14 | 16.88 | 19.56 | 12.28 | 16.57 | 16.82 | 18.31 | 16.92 | 17.00 | 17.06 | 17.44 |
| v2_11 | 18.00 | 18.72 | 20.38 | 22.85 | 20.23 | 17.67 | 18.39 | 15.50 | 22.44 | 17.75 | 18.25 | 17.85 |
| v2_12 | 16.10 | 16.56 | 15.52 | 21.68 | 20.32 | [symbol] | 17.92 | 17.73 | 17.47 | 16.29 | 16.29 | 16.25 |
| v2_13 | 18.81 | 17.27 | 17.33 | 19.08 | 17.90 | 17.23 | 17.27 | 18.40 | 17.81 | 17.52 | 17.47 | 18.01 |
| v2_14 | 16.96 | 17.62 | 22.02 | 19.18 | 17.82 | 17.12 | 22.90 | 20.00 | 19.16 | 17.34 | 17.23 | 17.21 |
| v2_3 | 16.42 | 17.08 | 16.84 | 18.58 | 16.71 | 17.00 | 12.37 | 17.79 | 17.96 | 16.57 | 16.93 | 16.84 |
| v2_15 | 17.92 | 18.17 | 17.91 | 20.22 | 17.95 | 17.91 | 18.45 | [symbol] | 18.77 | 18.23 | 18.25 | 18.61 |
| v2_16 | 24.76 | 18.30 | 18.93 | 22.15 | 19.43 | 18.80 | 18.86 | 20.28 | 20.92 | 18.73 | 18.89 | 18.73 |
| v2_17 | 18.09 | 24.51 | 16.16 | 18.94 | [symbol] | 16.56 | [symbol] | 22.36 | 24.89 | 17.24 | 16.27 | 16.82 |
| v2_18 | 18.42 | 18.48 | 23.35 | 21.52 | 18.56 | 18.09 | 18.87 | [symbol] | 18.52 | 17.46 | 18.49 | 17.19 |
| v2_19 | 16.51 | 16.38 | 16.80 | 23.81 | 17.57 | 17.46 | 17.67 | [symbol] | 17.21 | 16.45 | 16.54 | 16.79 |
| v2_20 | 18.93 | 19.54 | 19.31 | 22.41 | 23.51 | 18.16 | 20.73 | [symbol] | 22.82 | 19.36 | 20.02 | 19.21 |
| v2_5 | 17.52 | 17.74 | 17.88 | 19.47 | 17.85 | 25.83 | 18.10 | [symbol] | [symbol] | 18.13 | 17.82 | 18.43 |
| v2_2 | 16.74 | 17.39 | 16.29 | 22.73 | 17.23 | 20.08 | [symbol] | [symbol] | [symbol] | 16.59 | 16.64 | 16.83 |
| v2_21 | 17.81 | 17.73 | 17.56 | 20.13 | 17.83 | 17.54 | 23.19 | [symbol] | [symbol] | 17.64 | 17.84 | 17.92 |
| v2_22 | 18.02 | 20.54 | 17.91 | 21.03 | 72.13 | 17.71 | [symbol] | [symbol] | [symbol] | 17.83 | 18.37 | 18.44 |
| v2_23 | 17.85 | 17.54 | 17.63 | 20.78 | 18.31 | 17.87 | [symbol] | [symbol] | [symbol] | 24.64 | 18.08 | 18.24 |
| v2_24 | 18.20 | 18.83 | 18.42 | 21.03 | [symbol] | [symbol] | 19.08 | [symbol] | [symbol] | 25.00 | 24.30 | 18.58 |

[symbol]

indicates data missing or illegible when filed

TABLE 10-2

| Target No.: | 6 | 7 | 1 | 8 | 9 | 10 | 11 | 12 | 13 | 14 | 3 | 15 |
|---|---|---|---|---|---|---|---|---|---|---|---|---|
| v3.1_6 | 22.53 | 16.83 | 17.33 | 16.53 | 16.67 | 17.00 | 17.36 | 17.07 | 17.38 | 16.93 | 17.41 | 16.72 |
| v3.1_7 | 12.91 | 26.02 | 19.75 | 12.63 | 12.57 | 19.54 | 23.81 | 21.03 | 12.79 | 21.32 | 18.61 | 19.02 |
| v3.1_1 | 17.88 | 18.47 | 26.10 | 13.00 | 17.95 | 18.37 | 20.14 | 18.42 | 17.71 | [symbol] | 18.27 | 13.08 |
| v3.1_8 | 17.85 | 18.73 | 18.13 | 25.55 | 18.09 | 18.59 | 18.15 | 18.35 | 17.89 | 18.25 | 18.91 | 18.85 |
| v3.1_9 | 16.40 | 16.47 | 17.06 | 19.04 | 21.07 | 16.93 | 18.65 | 17.26 | 17.81 | 16.87 | 17.22 | 17.71 |
| v3.1_10 | 19.72 | 19.84 | 19.94 | 22.83 | [symbol] | 25.70 | 20.28 | 19.09 | 10.23 | 10.76 | 19.92 | 10.43 |
| v3.1_11 | 18.22 | 50.52 | 19.10 | 18.24 | 18.37 | 19.16 | 24.61 | 18.67 | 28.10 | 19.39 | 19.04 | 18.22 |
| v3.1_12 | 17.74 | 17.54 | 17.15 | 15.93 | 16.68 | 17.20 | 17.96 | 24.11 | 17.75 | 18.67 | 18.26 | 18.33 |
| v3.1_13 | 22.07 | 17.18 | 18.18 | 12.15 | 16.97 | 18.03 | 19.66 | 18.15 | 25.26 | 18.18 | 17.73 | 18.56 |
| v3.1_14 | 16.65 | 18.73 | 17.61 | [symbol] | 16.77 | 18.32 | [symbol] | 18.43 | 16.08 | 24.60 | 17.51 | 17.10 |
| v3.1_3 | 18.65 | 17.53 | 17.55 | 16.58 | 16.53 | 18.50 | 20.33 | 18.42 | 18.53 | 20.26 | 25.08 | 16.80 |
| v3.1_15 | 18.19 | 17.10 | 19.19 | 16.84 | 17.72 | 19.16 | 19.98 | 17.08 | 17.85 | 19.64 | 18.16 | 24.92 |
| v3.1_16 | 22.61 | 23.55 | 18.85 | 17.93 | 18.04 | 18.15 | 20.63 | 18.66 | 28.43 | 18.05 | 18.19 | 18.63 |
| v3.1_17 | 20.20 | 18.19 | 17.92 | 17.60 | 18.25 | 18.19 | 20.16 | 18.07 | 17.68 | 19.32 | 20.24 | 17.65 |
| v3.1_18 | 18.28 | 19.14 | 19.12 | 18.47 | 18.67 | 18.99 | 19.44 | 18.55 | 18.77 | 22.95 | 19.75 | 18.42 |
| v3.1_19 | 18.32 | 18.31 | 18.38 | 17.94 | 18.09 | 18.43 | 24.37 | 18.45 | 18.20 | 18.54 | 18.68 | 18.52 |
| v3.1_20 | 19.04 | 19.25 | 19.52 | 18.85 | 18.79 | 18.40 | 22.87 | 20.50 | 18.78 | 19.38 | 19.34 | 20.13 |
| v3.1_5 | 18.04 | 22.34 | 18.37 | 19.72 | 18.16 | 19.19 | 20.37 | 18.14 | 20.94 | 18.27 | 18.21 | 23.30 |
| v3.1_2 | 16.99 | 21.50 | 17.89 | 16.65 | 16.96 | 18.49 | 20.94 | 17.58 | 16.96 | 18.49 | 21.81 | 24.78 |
| v3.1_21 | 19.34 | 20.71 | 20.35 | 13.54 | 10.75 | 10.87 | 21.58 | 10.86 | 19.32 | 21.60 | 20.20 | 20.36 |
| v3.1_22 | 17.92 | 24.63 | 17.79 | 17.08 | 17.03 | 17.20 | 20.90 | 17.54 | 16.79 | 17.79 | 17.79 | 18.25 |
| v3.1_23 | 17.90 | 18.13 | 19.03 | 13.01 | 17.81 | 17.74 | 13.44 | 17.93 | 17.50 | 18.11 | 17.86 | 18.18 |
| v3.1_24 | 17.84 | 17.67 | 18.32 | 16.17 | 16.41 | 17.02 | [symbol] | 17.12 | 16.40 | 17.87 | 18.20 | 18.43 |
| Target No.: | 16 | 17 | 18 | 19 | 20 | 5 | 2 | 21 | 22 | 23 | 24 | [symbol] |
| v3.1_6 | 16.70 | 19.23 | 17.08 | 18.32 | 16.91 | 26.66 | [symbol] | 16.67 | [symbol] | [symbol] | [symbol] | [symbol] |
| v3.1_7 | 21.29 | 19.35 | 23.38 | 24.16 | 22.58 | 22.52 | [symbol] | 19.30 | [symbol] | [symbol] | [symbol] | [symbol] |
| v3.1_1 | 18.35 | 17.36 | [symbol] | 22.39 | [symbol] | 29.28 | [symbol] | [symbol] | [symbol] | [symbol] | [symbol] | [symbol] |
| v3.1_8 | 18.73 | 18.38 | 18.70 | 20.25 | [symbol] | 18.23 | [symbol] | 18.54 | [symbol] | [symbol] | [symbol] | [symbol] |
| v3.1_9 | 17.40 | 17.45 | 15.58 | 19.11 | [symbol] | 16.99 | [symbol] | 16.21 | [symbol] | [symbol] | [symbol] | [symbol] |
| v3.1_10 | 10.33 | 19.05 | 10.96 | 21.19 | 20.00 | 20.06 | [symbol] | 18.93 | [symbol] | [symbol] | [symbol] | [symbol] |
| v3.1_11 | 18.18 | 18.29 | 20.37 | 22.68 | 21.28 | [symbol] | [symbol] | [symbol] | [symbol] | [symbol] | [symbol] | [symbol] |
| v3.1_12 | 19.36 | 18.23 | 16.39 | 21.66 | 29.45 | [symbol] | [symbol] | [symbol] | [symbol] | [symbol] | [symbol] | [symbol] |
| v3.1_13 | 24.13 | 17.45 | 20.56 | 19.39 | [symbol] | [symbol] | [symbol] | [symbol] | [symbol] | [symbol] | [symbol] | [symbol] |
| v3.1_14 | 17.26 | 18.25 | 22.48 | 20.07 | 17.06 | [symbol] | [symbol] | [symbol] | [symbol] | [symbol] | [symbol] | [symbol] |
| v3.1_3 | 17.06 | 17.83 | 12.56 | 18.41 | 17.20 | [symbol] | [symbol] | [symbol] | [symbol] | [symbol] | [symbol] | [symbol] |
| v3.1_15 | 17.86 | 18.56 | 16.95 | 18.48 | 16.57 | [symbol] | [symbol] | [symbol] | [symbol] | [symbol] | [symbol] | [symbol] |
| v3.1_16 | 25.90 | 17.59 | 18.83 | 22.56 | 18.76 | [symbol] | [symbol] | [symbol] | [symbol] | [symbol] | [symbol] | [symbol] |
| v3.1_17 | 19.23 | 24.37 | 17.83 | 19.88 | [symbol] | [symbol] | [symbol] | [symbol] | [symbol] | [symbol] | [symbol] | [symbol] |
| v3.1_18 | 18.75 | 18.14 | 24.81 | 21.17 | [symbol] | [symbol] | [symbol] | [symbol] | [symbol] | [symbol] | [symbol] | [symbol] |
| v3.1_19 | 18.68 | 18.70 | 18.51 | 23.38 | [symbol] | [symbol] | [symbol] | [symbol] | [symbol] | [symbol] | [symbol] | [symbol] |
| v3.1_20 | 19.40 | 19.09 | 21.80 | 21.02 | [symbol] | [symbol] | [symbol] | [symbol] | [symbol] | [symbol] | [symbol] | [symbol] |
| v3.1_5 | 18.60 | 18.39 | 18.57 | 22.09 | [symbol] | [symbol] | [symbol] | [symbol] | [symbol] | [symbol] | [symbol] | [symbol] |
| v3.1_2 | 17.74 | 17.53 | 17.50 | 22.66 | [symbol] | [symbol] | [symbol] | [symbol] | [symbol] | [symbol] | [symbol] | [symbol] |
| v3.1_21 | 20.03 | 10.76 | 20.60 | 23.17 | [symbol] | [symbol] | [symbol] | [symbol] | [symbol] | [symbol] | [symbol] | [symbol] |
| v3.1_22 | 16.86 | 19.88 | 17.51 | 20.75 | [symbol] | [symbol] | [symbol] | [symbol] | [symbol] | [symbol] | [symbol] | [symbol] |
| v3.1_23 | 18.23 | 18.56 | 18.87 | 21.20 | [symbol] | [symbol] | [symbol] | [symbol] | [symbol] | [symbol] | [symbol] | [symbol] |
| v3.1_24 | 17.86 | 17.23 | [symbol] | 19.28 | [symbol] | [symbol] | [symbol] | [symbol] | [symbol] | [symbol] | [symbol] | [symbol] |

[symbol]

indicates data missing or illegible when filed

### (Affinity Evaluation)

[0219] Further, EMSA was performed in order to calculate the affinity (Kd value) of each PPR protein to the target RNA thereof. E. coli expression plasmids were constructed for 10 kinds of PPR proteins among 23 kinds of those mentioned above, to which a streptavidin-binding peptide sequence was added on the N-terminus side, and a 6×His-tag sequence on the C-terminus side (SBP_v2_PPR1 HIS, SBP_v2_PPR2_HIS, SBP_v2_PPR3_HIS, SBP_v2_PPR6_HIS, SBP_v2_PPR9_HIS, SBP_v2_PPR12_HIS, SBP_v2_PPR15_HIS, SBP_v2_PPR16_HIS, SBP_v2_PPR20_HIS, and SBP_v2_PPR24_HIS, SEQ ID NOS: 89 to 97). The Rosetta (DE3) strain of E. coli was transformed with the plasmids, and cultured overnight at 37° C. in 2 mL of the LB medium containing 100 μg/mL ampicillin. Then, 2 mL of the culture medium was transferred to 300 mL of the LB medium containing 100 μg/mL ampicillin, and culture was performed at 37° C. until OD₆₀₀ reached 0.5 to 0.8. After the culture, the temperature of the medium was lowered to 15° C., then 0.1 mM IPTG was added, and culture was continued for further 12 hours. The culture medium was centrifuged at 5000×g and 4° C. for 10 minutes to collect the cells, 5 mL of a lysis buffer (20 mM Tris-HCl, pH 8.0, 150 mM NaCl, 0.5% NP-40, 1 mM DTT, 1 mM EDTA) was added, and the mixture was stirred on Voltex mixer, and sonicated to disrupt the cells. The disrupted mixture was centrifuged at 15,000 rpm and 4° C. for 10 minutes, and the supernatant was collected.

[0220] Then, the objective proteins were purified by affinity chromatography using the SBP tag. Streptavidine Sepharose High Performance (GE Healthcare, 17511301) was taken in a volume of 100 μL, and the beads were collected by spin down, and equilibrated with a washing buffer (20 mM Tris-HCl, pH 8.0, 500 mM NaCl, 0.5% NP-40). The equilibrated beads were gently mixed with each of the previously collected cell extracts and permeabilized at 4° C. for 10 minutes. The entire volume of the beads mixture was loaded on a column, and then the beads were washed with 10 mL of the washing buffer. Elution was performed with an elution buffer (20 mM Tris-HCl, pH 8.0, 500 mM NaCl, 2 mM biotin).

[0221] Then, affinity purification using the histidine tag was performed. First, 200 μL of Ni-NTA agarose (Qiagen, 30230) was collected, and after centrifugation, the beads were collected. To the beads, 100 μL of the washing buffer was added, and the beads were equilibrated by permeabilization at 4° C. for 1 hour. The entire volume of the equilibrated beads was mixed with the protein solution eluted from the SBP beads, and reaction was allowed at 4° C. for 1 hour. The beads were collected by centrifugation at 2,000 rpm for 2 minutes, and factors non-specifically binding to the beads were removed with 10 mL of a washing buffer (20 mM Tris-HCl, pH 8.0, 500 mM NaCl, 0.5% NP-40, 10 mM imidazole). Elution was performed with 60 μl of an elution buffer (20 mM Tris-HCl, pH 8.0, 500 mM NaCl, 0.5% NP-40, 500 mM imidazole). Purification degree was confirmed by SDS-PAGE, and the eluted solution was dialyzed overnight at 4° C. against 20 mM Tris-HCl, pH 8.0, 150 mM NaCl, 0.5% NP-40, 1 mM DTT, 1 mM EDTA.

[0222] The total amount of the protein obtained after the dialysis was estimated by using Pierce 660 nm Protein Assay Kit (Thermo fisher, 22662). To determine the amount of the objective protein, each dialyzed sample was subjected to SDS-PAGE on a 10% polyacrylamide gel, and CBB staining was performed. The image of the stained gel was captured with ChemiDoc Touch MP Imaging System (Biorad). The total band intensity and intensity of the objective band were obtained from the gel image. The amount of the objective protein was calculated by multiplying the total protein amount by the ratio of the objective band intensity to the total band intensity. This value was used to calculate the molar concentration of purified protein in the dialyzed sample. On the basis of the molar concentrations calculated above, diluted protein solutions of 400 nM, 200 nM, 100 nM, 50 nM, 20 nM, 10 nM, 5 nM, 2 nM and 1 nM were prepared. Dilution was performed with a binding buffer (20 mM Tris-HCl, pH 8.0, 150 mM NaCl, 0.5% NP-40, 1 mM DTT, 1 mM EDTA). The final concentrations of the 5′-end biotinylated RNA probes (RNA_1, RNA_2, RNA_3, RNA_6, RNA_9, RNA_12, RNA_15, RNA_16, RNA_20, and RNA_24) were adjusted to 20 nM with the binding buffer. RNA samples were heat-treated at 75° C. for 1 minute, quenched and used for the following experiments.

[0223] The protein solution of each concentration prepared above was mixed with 20 nM RNA probe solution, and the binding reaction was allowed at 25° C. for 20 minutes.

[0224] After the reaction, 2 μL of 80% glycerol was added, and the mixture was sufficiently suspended. Then, 10 μL of the mixture was applied to the ATTO 7.5% gel, and electrophoresis was performed at C.V. 150 V for 30 minutes.

[0225] The gels after the electrophoresis were transferred to the Hybond N+ membrane (GE, RPN203B). Then, RNA was UV cross-linked to the membrane by using ASTEC Dual UV Transilluminator UVA-15 (Astec, 49909-06). The membrane was blocked with a blocking buffer (6.7 mM NaH₂PO₄.2H₂O, 6.7 mM Na₂HPO₄.2H₂O, 125 mM NaCl, 5% SDS). In this operatopm, 0.5 μL of Stereptavidine-HRP (Abcam, ab7403) was added to the blocking buffer beforehand, and the antigen-antibody reaction was allowed with permeabilization for 15 minutes. The blocking buffer was discarded, and 20 mL of a washing buffer (0.67 mM NaH₂PO₄.2H₂O, 0.67 mM Na₂HPO₄.2H₂O, 12.5 mM NaCl, 0.5% SDS) was added to wash the membrane. This washing procedure was repeated five times, and then 20 ml of an equilibration buffer (100 mM Tris-HCl, pH 9.5, 100 mM NaCl, 10 mM MgCl₂) was added to permeabilize the membrane for 5 minutes. Then, Immunobilon Western Chemiluminescent HRP Substrate (Millipore, Cat. No. WBKLS0100) was added to the membrane, and bands were detected by using chemiluminescence of the biotinylated RNA. The gel images were captured by using ChemiDoc Touch MP Imaging System (Biorad). The band intensities of the unbound RNA probe band and the band shifted by binding to the protein were calculated. The equilibrium dissociation constant (Kd value) was calculated from the molar concentration of the protein and the ratio of the corresponding shifted band according to the Hill equation.

[0226] The results are shown in FIG. 10. It was found that the prepared PPR proteins had a Kd value of 10⁻⁹ to 10⁻⁷ M for the targets. The minimum value (high affinity) was 1.95×10⁻⁹, which is the lowest Kd value among those of the designed PPR proteins reported so far (see Table 1). It was also found that these Kd values correlated with the signal values obtained in the binding experiments based on RPB-ELISA (R2=−0.85). On the basis of these results, it can be estimated that the Kd value is 10⁻⁶ to 10⁻⁷ M for the RPB-ELISA luminescence value of 1 to 2×10⁷, 10⁻⁷ to 10⁻⁸ M for the RPB-ELISA luminescence value of 2 to 4×10⁷, and ˜10⁻⁸ or lower for the RPB-ELISA luminescence value larger than 4×10⁷.

### (Evaluation of Successful Construction Rate)

[0227] Further, PPR proteins for 72 kinds of target sequences (T1 to T3, and T6 to T76, SEQ ID NOS: 46 to 48, 51 to 69, and 117 to 168) were prepared by using the v2 motif (NL_v2_PPR1 to 3, and NL_v2_PPR6 to 76, SEQ ID NOS: 56 to 58, 70 to 88, and 169 to 220), and the probability of successful construction was calculated by using RPB-ELISA. Biotinylated RNA probes containing the target sequence (RNA_1 to 3, and RNA_6 to 76, SEQ ID NOS: 61 to 63, 98 to 116, and 221 to 272) and a biotinylated RNA probe (RNA51, SEQ ID NO: 247) containing the non-target sequence (T_51, SEQ ID NO: 143) were prepared (Greinar). The experimental method was the same as that used in Example 3. The results are shown in FIG. 11.

[0228] Of the 72 kinds of the PPR proteins, 63 (88%) were estimated to have a Kd value of 10⁻⁶ M or lower (RPB-ELISA value of 1×10⁷ or higher), 57 (79%) were estimated to have a Kd value of 10⁻⁷ M or lower (RPB-ELISA value of 2×10⁷ or higher), and 43 (40%) were estimated to have a Kd value of 10⁻⁸ M or lower (RPB-ELISA value of 4×10⁷ or higher). A value obtained by dividing the target binding signal by the non-target binding signal (S/N) was used as a value for evaluating the specificity. Those that showed an S/N higher than 10 were 54 (75%), and those that showed an S/N higher than 100 were 23 (32%). These results indicate that sequence-specific RNA-binding proteins can be efficiently prepared by preparing PPR proteins using the v2 motif

### (Evaluation of Target Binding Activity in Relation to the Number of PPR Motifs)

[0229] Analysis was performed for the relation of the number of PPR motifs and target-binding activity. There were determined 13 kinds of 18-base target sequences, and the 3 nucleotides or 6 nucleotides of the 5′-end side of each sequence were deleted to design 15-base target sequences (T_1a, T_49a, T_3a, T_14a, T_40a, T_12a, T_13a, T_2a, T_38a, T_37a T_39a, T_56a, and T_68a, SEQ ID NOS, 273, 275, 277, 279, 281, 283, 285, 287, 289, 291, 293, 395, and 297), and 12-base target sequences (T_1b, T_49b, T_3b, T_14b, T_40b, T_12b, T_13b, T_2b, T_38b, T_37b T_39b, T_56b, and T_68b, SEQ ID NOS: 274, 276, 278, 280, 282, 284, 286, 288, 290, 292, 294, 296, and 298), respectively. The corresponding PPR proteins (those of 15 motifs were named PPRxa, and those of 12 motifs were named PPRxb) were prepared (NL_v2_PPR1, 1a, and 1b; NL_v2_PPR49, 49a, and 49b; NL_v2_PPR3, 3a, and 3b; NL_v2_PPR14, 14a, and 14b; NL_v2_PPR 40, 40a, and 40b; NL_v2_PPR12, 12a, and 12b; NL_v2_PPR13, 13a, and 13b; NL_v2_PPR2, 2a, and 2b; NL_v2_PPR38, 38a, and 38b; NL_v2_PPR37, 37a, and 37b; NL_v2_PPR39, 39a, and 39b; NL_v2_PPR56, 56a, and 56b; and NL_v2_PPR68, 68a, and 68b, SEQ ID NOS: 56, and 299 to 324). For analysis by RPB-ELISA, biotinylated RNA probes containing the target sequence (T_1, T_49, T_3, T_14, T_40, T_12, T_13, T_2, T_38, T_37, T_39, T_56, and T_68) and a biotinylated RNA probe (RNA_51, SEQ ID NO: 247) containing a non-target sequence (T_51, SEQ ID NO: 143) were prepared, and binding activities of the respective PPR proteins to the target (on target) and non-target (off target) were analyzed by RPB-ELISA.

[0230] The results for each target sequence are shown in FIG. 12A. The averages of the values for each of the 18-, 15-, and 12-motif proteins are plotted as a box-and-whisker diagram shown in FIG. 12B. A higher number of the motifs provided higher binding strength, and the 18-motif proteins were found to enable more stable preparation of proteins with higher binding strength in comparison of the 18-motif and 15-motif proteins.

### Example 5: Artificial Control of Splicing Using PPR Proteins

[0231] In order to demonstrate that PPR proteins can bind to a target RNA molecule in the cells and enable desired RNA manipulation, an experiment was performed by using a splicing reporter (FIG. 13A). The splicing reporter (RG6) has a genetic structure comprising exon 1, intron 1, exon 2, intron 2, exon 3, etc. (Orengo et al., 2006 NAR). Into intron 1, exon 2, and intron 2, intron 4, and intron 5 of chicken cTNT, and an artificially created alternative exon sequence were inserted. This reporter had two splicing forms, and the amount ratio of mRNAs with and without skip of exon 2 is about 1:1. RFP and GFP genes are encoded in exon 3. In this respect, the reading frame changes depending on the presence or absence of exon 2, so that RFP is expressed with mRNA in which exon 2 is skipped, and GFP is expressed with mRNA in which exon 2 is not skipped. It is known that the amounts of the splicing forms of this reporter are controlled by splicing factors that bind to the regions of intron 1, exon 2, and intron 2 (Orengo et al., 2006 NAR). Therefore, 18 nucleotides sequences were selected from the regions of intron 1, exon 2, and intron 2, and whether the splicing form of the RG-6 reporter could be changed by PPR proteins that bind to those sequences was examined.

[0232] Seven kinds of target sequences (T77 to T83, SEQ ID NOS: 325 to 330) were selected from the RG6 reporter. The PPR protein genes were designed with both v1 and v2 motifs (v1_PPRsp1 to 6, and v2_PPRsp1 to 6, SEQ ID NOS: 331 to 342). The protein genes were cloned into pcDNA3.1 so that proteins fused with a nuclear localization signal on the N-terminus side and a FLAG epitope tag sequence on the C-terminus side should be expressed (NLS_v1PPRsp1 to 6, and NLS_v2PPRsp1 to 6, SEQ ID NOS: 343 to 354). pcDNA3.1 has the CMV promoter and SV40 poly-A signal (terminator), and the PPR protein gene was inserted between them.

[0233] The HEK293T cells were inoculated at a density of 1×10⁶ cells in 10 cm dish containing 9 mL of DMEM, and 1 mL of FBS, and cultured in an environment of 37° C. and 5% CO₂ for 2 days, and then the cells were collected. The collected cells were inoculated on a PLL-coated 96-well plate at a density of 4×10⁴ cells/well, and cultured in an environment of 37° C. and 5% CO₂ for 1 day. A mixture of 100 ng of PPR expression plasmid DNA, 100 ng of RG-6, 0.6 μL of Fugene (registered trademark)-HD (Promega, E2311), and 200 μL Opti-MEM was prepared, the whole volume thereof was added to the wells, and culture was performed in an environment of 37° C. and 5% CO₂ for 2 days. As a control, a sample not containing any PPR expression plasmid DNA was also prepared. After the culture, GFP and RFP fluorescence images of each well were obtained by using a fluorescence microscope DMi8 (Leica). As for the imaging conditions, exposure time and gain at which the intensities of GFP and RFP became substantially the same were first determined by using a sample containing only the RG-6 plasmid, and the fluorescence images of the samples were obtained under the same conditions.

[0234] After acquisition of the image, total RNA was extracted by using the Maxwell (registered trademark) RSC simplyRNA Cells Kit. To a 0.2-mL tube, 500 ng of the extracted total RNA, 0.5 μL of 100 μM dT20 primer, and 0.5 μL of 10 mM dNTPs were added, left at 65° C. for 5 minutes, and immediately cooled on ice. To this, 2 μL of 5× RT-buffer (Invitrogen, 18080-051), 0.5 μL of 0.1M DTT, 0.5 μL of 40 U/μL RNaseOUT (Invitrogen, 18080-051), and 0.5 μL of 200 unit/4 SupperScript III (Invitrogen, 18080-051) were added, and reaction was allowed in a thermal cycler at 50° C. for 50 minutes, then at 85° C. for 5 minutes, and cooled to 16° C. The reverse transcribed sample was diluted 10-fold with sterile water. To a 0.2-mL tube, 2 μL of the reaction mixture, 10 μL of 5×GXL buffer (TAKARA, R050A), 4 μL of 2.5 mM dNTPs, 1.5 μL of 10 μM RT-Fw primer (5′-CAAAGTGGAGGACCCAGTACC-3′, SEQ ID NO: 355), 1.5 μL of 10 μM RT-Rv Primer (5′-GCGCATGAACTCCTTGATGAC-3′, SEQ ID NO: 356), 1 μL of GXL (TAKARA, R050A), and 31.5 μL of sterile water were added, reaction was allowed in a thermal cycler at 98° C. for 2 minutes, followed by 35 cycles of 98° C. for 10 seconds, 58° C. for 15 seconds, and 68° C. for 5 seconds, and then the reaction mixture was cooled to 12° C. The reaction mixture was diluted 10 times, and electrophoresed with MultiNA (SHIMADZU, MCE202). The band of about 114 bp and the band of about 142 bp were regarded as the band of exon-skipped RNA and the band of unskipped RNA, respectively, and the band intensities of the samples were calculated. A value obtained by dividing the 114 bp band intensity by the sum of the 114 bp band intensity and the 142 bp band intensity was defined as the splicing ratio.

[0235] The results are shown in FIGS. 13B and 13C. It was found that the splicing ratio was 0.48 when only the RG6 reporter was introduced, and was similar when PPRsp4 was introduced, but significantly changed when the other PPRs were introduced. In comparison of v1 and v2, v2 provided a larger change except for PPRsp4. These splicing ratios were also consistent with the RFP and GFP expression ratios shown in FIG. 13B. These results verified that PPR proteins can be used to change exon skipping, and revealed that the v2 motif can be used to change splicing even more efficiently.

### Example 6: Regulation of Aggregation of PPR Protein

[0236] A PPR protein using V2 motif (SEQ ID NO: 457 for nucleotide sequence, and SEQ ID NO: 458 for amino acid sequence) and a PPR protein using v3.2 motif (SEQ ID NO: 459 for nucleotide sequence, and SEQ ID NO: 460 for amino acid sequence) were prepared in an E. coli expression system, respectively, purified, and separated by gel filtration chromatography.

### (Expression and Purification of Proteins)

[0237] The E. coli Rosetta strain was transformed with pE-SUMOpro Kan plasmid containing a DNA sequence encoding the objective PPR protein, and cultured at 37° C., then the temperature was lowered to 20° C. when OD₆₀₀ reached 0.6, and IPTG was added at a final concentration of 0.5 mM so that the objective PPR was expressed in the E. coli cells as SUMO-fused protein. The cells were cultured overnight, then collected by centrifugation, and resuspended in a lysis buffer (50 mM Tris-HCl, pH 8.0, 500 mM NaCl). The E. coli cells were disrupted by sonication, and centrifuged at 17,000 g for 30 minutes, then the supernatant fraction was applied to an Ni-Agarose column, the column was washed with the lysis buffer containing 20 mM imidazole, and then the SUMO-fused objective PPR protein was eluted with the lysis buffer containing 400 mM imidazole. After the elution, the SUMO protein was cleaved from the objective PPR protein with Ulp1, and at the same time, the protein solution was substituted with an ion-exchange buffer (50 mM Tris-HCl, pH 8.0, 200 mM NaCl) by dialysis. Subsequently, cation exchange chromatography was performed by using SP column. After application to the column, proteins were eluted with gradually increasing NaCl concentration of from 200 mM to 1 M. The fraction containing the objective PPR protein was subjected to final purification by gel filtration chromatography using Superdex 200 column. The objective PPR protein eluted from the ion exchange column was applied to the gel filtration column equilibrated with a gel filtration buffer (25 mM HEPES, pH 7.5, 200 mM NaCl, 0.5 mM tris(2-carboxyethyl)phosphine (TCEP)). Finally, the fraction containing the objective PPR protein was concentrated, frozen in liquid nitrogen, and stored at −80° C. until used for the next analysis.

### (Gel Filtration Chromatography)

[0238] The purified recombinant PPR protein was prepared at a concentration of 1 mg/ml. For gel filtration chromatography, Superdex 200 increase 10/300 GL (GE Healthcare) was used. To the gel filtration column equilibrated with 25 mM HEPES pH7.5, 200 mM NaCl, 0.5 mM tris(2-carboxyethyl)phosphine (TCEP), the prepared protein was applied, and the absorbance of the solution eluted from the gel filtration column was measured at 280 nm to analyze the properties of the protein.

### (Results)

[0239] The results are shown in FIG. 14. The smaller volume of the elution fraction (Elution vol.) means a larger molecular size. The protein using v2 were eluted in elution fractions of 8 to 10 mL, whereas the peak of the protein using v3.2 was observed in elution fractions of 12 to 14 mL. This result suggested the possibility that the protein using v2 aggregated due to the larger protein size thereof, and the aggregation was improved in the protein using v3.2.

1. A PPR motif, which is any one of the following PPR motifs:
(A-1) a PPR motif consisting of the sequence of SEQ ID NO: 9, or a PPR motif consisting of the sequence of SEQ ID NO: 9 having a substitution selected from the group consisting of substitution of the amino acid at position 10 with tyrosine, substitution of the amino acid at position 15 with lysine, substitution of the amino acid at position 16 with leucine, substitution of the amino acid at position 17 with glutamic acid, substitution of the amino acid at position 18 with aspartic acid, and substitution of the amino acid at position 28 with glutamic acid, or a PPR motif consisting of the sequence of SEQ ID NO: 401 or a PPR motif consisting of the sequence of SEQ ID NO: 401 having a substitution selected from the group consisting of substitution of the amino acid at position 10 with tyrosine, substitution of the amino acid at position 16 with leucine, substitution of the amino acid at position 17 with glutamic acid, substitution of the amino acid at position 18 with aspartic acid, and substitution of the amino acid at position 28 with glutamic acid;
(A-2) a PPR motif consisting of the sequence of SEQ ID NO: 9 or 401 having a substitution, deletion, or addition of 1 to 20 amino acids other than the amino acids at positions 1, 2, 3, 4, 6, 7, 9, 11, 12, 14, 19, 26, 30, 33, and 34, and having an adenine-binding property;
(A-3) a PPR motif having a sequence identity of at least 42% to the sequence of SEQ ID NO: 9 or 401, provided that the amino acids at positions 1, 2, 3, 4, 6, 7, 9, 11, 12, 14, 19, 26, 30, 33, and 34 are identical, and having an adenine-binding property;
(C-1) a PPR motif consisting of the sequence of SEQ ID NO: 10, or a PPR motif consisting of the sequence of SEQ II) NO: 10 having a substitution of amino acid selected from the group consisting of substitution of the amino acid at position 2 with serine, substitution of the amino acid at position 5 with isoleucine, substitution of the amino acid at position 7 with leucine, substitution of the amino acid at position 8 with lysine, substitution of the amino acid at position 10 with phenylalanine or tyrosine, substitution of the amino acid at position 15 with arginine, substitution of the amino acid at position 22 with valine, substitution of the amino acid at position 24 with arginine, substitution of the amino acid at position 27 with leucine, and substitution of the amino acid at position 29 with arginine;
(C-2) a PPR motif consisting of the sequence of SEQ ID NO: 10 having a substitution, deletion, or addition of 1 to 2.5 amino acids other than the amino acids at positions 1, 3, 4, 14, 18, 19, 26, 30, 33, and 34, and having a cytosine-binding property;
(C-3) a PPR motif having a sequence identity of at least 25% to the sequence of SEQ. ID NO: 10, provided that the amino acids at positions 1, 3, 4, 14, 18, 19, 26, 30, 33, and 34 are identical, and having a cytosine-binding property;
(G-1) a PPR motif consisting of the sequence of SEQ ID NO: 11, or a PPR motif consisting of the sequence of SEQ ID NO: 11 having a substitution selected from the group consisting of substitution of the amino acid at position 10 with phenylalanine, substitution of the amino acid at position 15 with aspartic acid, substitution of the amino acid at position 27 with value, substitution of the amino acid at position 28 with serine, and substitution of the amino acid at position 35 with iso leucine;
(G-2) a PPR motif consisting of the sequence of SEQ ID NO: 11 having a substitution, deletion, or addition of 1 to 21 amino acids other than the amino acids at positions 1, 2, 3, 4, 6, 7, 9, 14, 18, 19, 26, 30, 33, and 34, and having a guanine-binding property;
(G-3) a PPR motif having a sequence identity of at least 40% to the sequence of SEQ ID NO: 11, provided that the amino acids at positions 1, 2, 3, 4, 6, 7, 9, 14, 18, 19, 26, 30, 33, and 34 are identical, and having a guanine-binding property;
(U-1) a PPR motif consisting of the sequence of SEQ ID NO: 12, or a PPR motif consisting of the sequence of SEQ ID NO: 12 having a substitution selected from the group consisting of substitution of the amino acid at position 10 with phenylalanine, substitution of the amino acid at position 13 with serine, substitution of the amino acid at position 15 with lysine, substitution of the amino acid at position 17 with glutamic acid, substitution of the amino acid at position 20 with leucine, substitution of the amino acid at position 21 with lysine, substitution of the amino acid at position 23 with phenylalanine, substitution of the amino acid at position 24 with aspartic acid, substitution of the amino acid at position 27 with lysine, substitution of the amino acid at position 2.8 with lysine, substitution of the amino acid at position 2.9 with arginine, and substitution of the amino acid at position 31 with leucine;
(U-2) a PPR motif consisting of the sequence of SEQ ID NO: 12 having a substitution, deletion, or addition of 1 to 22 amino acids other than the amino acids at positions 1, 2, 3, 4, 6, 11, 12, 14, 19, 26, 30, 33, and 34, and having a uracil-binding property; and
(U-3) a PPR motif having a sequence identity of at least 37% to the sequence of SEQ ID NO: 12, provided that the amino acids at positions 1, 2, 3, 4, 6, 11, 12, 14, 19, 26, 30, 33, and 34 are identical, and having a uracil-binding property.

2. Use of the PPR motif according to claim 1 for preparation of a PPR protein of which target RNA has a length of 15 bases or longer.

3. Use of the PPR motif according to claim 1 for preparation of a PPR protein, which is for enhancing binding performance of the PPR protein to a target RNA.

4. A PPR protein comprising n of PPR motifs and capable of binding to a target RNA consisting of a sequence of n bases m length, wherein:
the PPR motif for adenine in the base sequence is the PPR motif of (A-1), (A-2), or (A-3) defined in;
the PPR motif for cytosine in the base sequence is the PPR motif of (C-1), (C-2), or (c-3) defined in;
the PPR motif for guanine in the base sequence is the PPR motif of (G-1), (G-2), or (G-3) defined in; and
the PPR motif for uracil in the base sequence is the PPR motif of (U-1), (U-2), or (U-3) defined in claim 1.

5. The protein according to claim 4, wherein n is 15 or larger.

6. The protein according to claim 4, wherein the first PPR motif from the N-terminus is any one of the following motifs:
(1st_A-1) a PPR motif consisting of the sequence of SEQ ID NO: 402 having such substitutions of the amino acids at positions 6 and 9 that any one of the combinations defined below is satisfied;
(1 st_A-2) a PPR motif comprising the sequence of (1st_A-1) having a substitution, deletion, or addition of 1 to 9 amino acids other than the amino acids at positions 1, 4, 6, 9, and 34, and having an adenine-binding property;
(1st_A-3) a PPR motif having a sequence identity of at least 80% to the sequence of (1st_A-1), provided that the amino acids at positions 1, 4, 6, 9, and 34 are identical, and having an adenine-binding property;
(1st_C-1) a PPR motif consisting of the sequence of SEQ ID NO: 403;
(1st_C-2) a PPR motif comprising the sequence of (1st_C-1) having a substitution, deletion, or addition of 1 to 9 amino acids other than the amino acids at positions 1, 4, 6, 9, and 34, and having a cytosine-binding property;
(1st_C-3) a PPR motif having a sequence identity of at least 80% to the sequence of (1st_C-1), provided that the amino acids at positions 1, 4, 6, 9, and 34 are identical, and having a cytosine binding property;
(1 st_G-1) a PPR motif consisting of the sequence of SEQ ID NO: 404 having such substitutions of the amino acids at positions 6 and 9 that any one of the combinations defined below is satisfied;
(1st_G-2) a PPR motif comprising the sequence of (1st_G-1) having a substitution, deletion, or addition of 1 to 9 amino acids other than the amino acids at positions 1, 4, 6, 9, and 34, and having a guanine-binding property;
(1st_G-3) a PPR motif having a sequence identity of at least 80% to the sequence of (1st_G-1), provided that the amino acids at positions 1, 4, 6, 9, and 34 are identical, and having a guanine-binding property;
(1st_U-1) a PPR motif consisting of the sequence of SEQ ID NO: 405 having such substitutions of the amino acids at positions 6 and 9 that any one of the combinations defined below is satisfied;
(1st_U-2) a PPR motif comprising the sequence of (1st_U-1) having a substitution, deletion, or addition of 1 to 9 amino acids other than the amino acids at positions 1, 4, 6, 9, and 34, and having a uracil-binding property; and
(1st_U-3) a PPR motif having a sequence identity of at least 80% to the sequence of (1st_U-1), provided that the amino acids at positions 1, 4, 6, 9, and 34 are identical, and having a uracil-binding property:
a combination of asparagine as the amino acid at position 6 and glutamic acid as the amino acid at position 9,
a combination of asparagine as the amino acid at position 6 and glutamine as the amino acid at position 9,
a combination of asparagine as the amino acid at position 6 and lysine as the amino acid at position 9, and
a combination of aspartic acid as the amino acid at position 6 and glycine as the amino acid at position 9.

7. A method for controlling RNA splicing, which uses the protein according to claim 4.

8. A method for detecting RNA, which uses the protein according to claim 4.

9. A fusion protein of at least one selected from the group consisting of a fluorescent protein, a nuclear localization signal peptide, and a tag protein, and the protein according to claim 4.

10. A nucleic acid encoding the PPR motif according to claim 1.

11. A vector comprising the nucleic acid according to claim 10.

12. A cell (except for human individual) containing the vector according to claim 11.

13. A method for manipulating RNA, which uses the PPR motif according to claim 1.

14. A method for producing an organism, which comprises the manipulation method according to claim 13.

15. A nucleic acid encoding the protein according to claim 4.

16. A method for manipulating RNA, which uses the protein according to claim 4.

17. A method for manipulating RNA, which uses the vector according to claim 11 (implementation in human individual is excluded).

The application's sequence listing, which the Patent Office published only in electronic form, follows.

SEQUENCE LISTING (460 sequences)

SEQ ID NO: 1 - protein, 35 aa, Artificial Sequence
  misc_feature (1)..(1): Xaa can be any naturally occurring amino acid
  misc_feature (4)..(4): Xaa can be any naturally occurring amino acid
  misc_feature (34)..(34): Xaa can be any naturally occurring amino acid
  Synthesized Sequence
XTYXTLISGLGKAGRLEEALELFEEMKEKGIVPXV

SEQ ID NO: 2 - protein, 35 aa, Artificial Sequence
  misc_feature (1)..(1): Xaa can be any naturally occurring amino acid
  misc_feature (4)..(4): Xaa can be any naturally occurring amino acid
  misc_feature (34)..(34): Xaa can be any naturally occurring amino acid
  Synthesized Sequence
XTYXTLIDGLCKAGKLDEALKLFEEMVEKGIKPXV

SEQ ID NO: 3 - protein, 35 aa, Artificial Sequence
  misc_feature (1)..(1): Xaa can be any naturally occurring amino acid
  misc_feature (4)..(4): Xaa can be any naturally occurring amino acid
  misc_feature (34)..(34): Xaa can be any naturally occurring amino acid
  Synthesized Sequence
XTYXTLIDGLAKAGRLEEALQLFQEMKEKGVKPXV

SEQ ID NO: 4 - protein, 35 aa, Artificial Sequence; identical to SEQ ID NO: 2
  misc_feature (1)..(1): Xaa can be any naturally occurring amino acid
  misc_feature (4)..(4): Xaa can be any naturally occurring amino acid
  misc_feature (34)..(34): Xaa can be any naturally occurring amino acid
  Synthesized Sequence

SEQ ID NO: 5 - protein, 35 aa, Artificial Sequence
  Synthesized Sequence
VTYNILIKGLCKAGKLEEALSLLSEMVEKGIQPDV

SEQ ID NO: 6 - protein, 35 aa, Artificial Sequence
  Synthesized Sequence
VTYNTLISGFCKAGRLEEAMSLFSEMKSKGLVPSV

SEQ ID NO: 7 - protein, 35 aa, Artificial Sequence
  Synthesized Sequence
VTYTTLIDAFCRKGRLDEALSLFSEMKSKGIKPNV

SEQ ID NO: 8 - protein, 35 aa, Artificial Sequence
  Synthesized Sequence
VTYTILIDALCKAGRLEEALSLFSEMKEIGIKPDV

SEQ ID NO: 9 - protein, 35 aa, Artificial Sequence
  Synthesized Sequence
VTYTTLIDGLCKAGKLDEALKLFEEMVEKGIKPNV

SEQ ID NO: 10 - protein, 35 aa, Artificial Sequence
  Synthesized Sequence
VTYNTLIDGLCKSGKIEEALKLFKEMEEKGITPSV

SEQ ID NO: 11 - protein, 35 aa, Artificial Sequence
  Synthesized Sequence
VTYTTLIDGLCKAGKVDEALELFDEMKERGIKPDV

SEQ ID NO: 12 - protein, 35 aa, Artificial Sequence
  Synthesized Sequence
VTYNTLIDGLCKAGRLDEAEELLEEMEEKGIKPDV

SEQ ID NO: 13 - protein, 35 aa, Artificial Sequence; identical to SEQ ID NO: 9
  Synthesized Sequence

SEQ ID NO: 14 - protein, 35 aa, Artificial Sequence
  Synthesized Sequence
VTYNTLIDGLCKAGKLDEALKLFEEMVEKGIKPSV

SEQ ID NO: 15 - protein, 35 aa, Artificial Sequence
  Synthesized Sequence
VTYTTLIDGLCKAGKLDEALKLFEEMVEKGIKPDV

SEQ ID NO: 16 - protein, 35 aa, Artificial Sequence
  Synthesized Sequence
VTYNTLIDGLCKAGKLDEALKLFEEMVEKGIKPDV

SEQ ID NO: 17 - DNA, 7 bp, Artificial Sequence
  misc_feature (7)..(7): n is a, c, g, t or u
  Synthesized Sequence
ggtctcn

SEQ ID NO: 18 - DNA, 11 bp, Artificial Sequence
  Synthesized Sequence
ggtctcaatac

SEQ ID NO: 19 - DNA, 11 bp, Artificial Sequence
  Synthesized Sequence
gtggtgagacc

SEQ ID NO: 20 - DNA, 18 bp, Artificial Sequence
  Synthesized Sequence
gtggtcacatatgagacc

SEQ ID NO: 21 - DNA, 12 bp, Artificial Sequence
  Synthesized Sequence
ggtctcacatac

SEQ ID NO: 22 - DNA, 47 bp, Artificial Sequence
  Synthesized Sequence
gaagacatatacagagaccaaggtctcagtggtgacataatgtcttc

SEQ ID NO: 23 - DNA, 47 bp, Artificial Sequence
  Synthesized Sequence
gaagacatcatacagagaccaaggtctcagtggttacatatgtcttc

SEQ ID NO: 24 - DNA, 47 bp, Artificial Sequence
  Synthesized Sequence
gaagacatacatacagagaccaaggtctcagtggttacaatgtcttc

SEQ ID NO: 25 - DNA, 47 bp, Artificial Sequence
  Synthesized Sequence
gaagacattacatacagagaccaaggtctcagtggtgacatgtcttc

SEQ ID NO: 26 - DNA, 47 bp, Artificial Sequence
  Synthesized Sequence
gaagacattgacatacagagaccaaggtctcagtggttaatgtcttc

SEQ ID NO: 27 - DNA, 47 bp, Artificial Sequence
  Synthesized Sequence
gaagacatgttacatacagagaccaaggtctcagtggtcatgtcttc

SEQ ID NO: 28 - DNA, 47 bp, Artificial Sequence
  Synthesized Sequence
gaagacatggtcacatacagagaccaaggtctcagtggtatgtcttc

SEQ ID NO: 29 - DNA, 47 bp, Artificial Sequence
  Synthesized Sequence
gaagacattggttacatacagagaccaaggtctcagtggatgtcttc

SEQ ID NO: 30 - DNA, 45 bp, Artificial Sequence
  Synthesized Sequence
gaagacatgtggtgacatacagagaccaaggtctcagtggtcttc

SEQ ID NO: 31 - protein, 5 aa, Artificial Sequence
  Synthesized Sequence
MGNSV

SEQ ID NO: 32 - protein, 22 aa, Artificial Sequence
  Synthesized Sequence
ELTYNTLISGLGKAGRARDPPV

SEQ ID NO: 33 - DNA, 20 bp, Artificial Sequence
  Synthesized Sequence
ttgatgcctggcagttccct

SEQ ID NO: 34 - DNA, 20 bp, Artificial Sequence
  Synthesized Sequence
cgaaccgaacaggcttatgt

SEQ ID NO: 35 - DNA, 415 bp, Artificial Sequence
  misc_feature (3)..(3): n is a, c, g, t or u
  misc_feature (48)..(48): n is a, c, g, t or u
  misc_feature (70)..(70): n is a, c, g, t or u
  misc_feature (75)..(75): n is a, c, g, t or u
  misc_feature (136)..(136): n is a, c, g, t or u
  misc_feature (158)..(158): n is a, c, g, t or u
  misc_feature (163)..(163): n is a, c, g, t or u
  misc_feature (185)..(185): n is a, c, g, t or u
  misc_feature (207)..(207): n is a, c, g, t or u
  misc_feature (229)..(229): n is a, c, g, t or u
  misc_feature (251)..(251): n is a, c, g, t or u
  misc_feature (273)..(273): n is a, c, g, t or u
  misc_feature (295)..(295): n is a, c, g, t or u
  misc_feature (400)..(400): n is a, c, g, t or u
  misc_feature (403)..(403): n is a, c, g, t or u
  Synthesized Sequence
mgnsvvtyttdgckagkdakmvkgkdvvtyttdgckagkdakmvkgknvvtyttdgckagkdakmvkgknvvtyntdgckagkdakmvkgkdvvtyttdgckagkdakmvkgkdvvtyttdgckagkdakmvkgknvvtyttdgckagkdakmvkgknvvtyntdgckagkdakmvkgksvvtyntdgckagkdakmvkgkdvvtyntdgckagkdakmvkgksvvtyntdgckagkdakmvkgkdvvtyntdgckagkdakmvkgkdvvtyntdgckagkdakmvkgksvvtyntdgckagkdakmvkgksvvtyttdgckagkdakmvkgkdvvtyttdgckagkdakmvkgkdvvtyttdgckagkdakmvkgkdvvtyttdgckagkdakmvkgkntyntsggkagrardv

SEQ ID NO: 36 - DNA, 415 bp, Artificial Sequence
  misc_feature (3)..(3): n is a, c, g, t or u
  misc_feature (48)..(48): n is a, c, g, t or u
  misc_feature (92)..(92): n is a, c, g, t or u
  misc_feature (158)..(158): n is a, c, g, t or u
  misc_feature (180)..(180): n is a, c, g, t or u
  misc_feature (207)..(207): n is a, c, g, t or u
  misc_feature (229)..(229): n is a, c, g, t or u
  misc_feature (251)..(251): n is a, c, g, t or u
  misc_feature (312)..(312): n is a, c, g, t or u
  misc_feature (356)..(356): n is a, c, g, t or u
  misc_feature (383)..(383): n is a, c, g, t or u
  misc_feature (403)..(403): n is a, c, g, t or u
  Synthesized Sequence
mgnsvvtyttdgckagkdakmvkgkdvvtyttdgckagkdakmvkgknvvtyttdgckagkdakmvkgkdvvtyttdgckagkdakmvkgknvvtyttdgckagkdakmvkgkdvvtyttdgckagkdakmvkgkdvvtyttdgckagkdakmvkgknvvtyttdgckagkdakmvkgknvvtyttdgckagkdakmvkgkdvvtyntdgckagkdakmvkgksvvtyntdgckagkdakmvkgksvvtyntdgckagkdakmvkgkdvvtyttdgckagkdakmvkgkdvvtyttdgckagkdakmvkgknvvtyttdgckagkdakmvkgkdvvtyttdgckagkdakmvkgknvvtyttdgckagkdakmvkgkdvvtyntdgckagkdakmvkgkdtyntsggkagrardv

SEQ ID NO: 37 - DNA, 415 bp, Artificial Sequence
  misc_feature (3)..(3): n is a, c, g, t or u
  misc_feature (9)..(9): n is a, c, g, t or u
  misc_feature (31)..(31): n is a, c, g, t or u
  misc_feature (92)..(92): n is a, c, g, t or u
  misc_feature (119)..(119): n is a, c, g, t or u
  misc_feature (141)..(141): n is a, c, g, t or u
  misc_feature (180)..(180): n is a, c, g, t or u
  misc_feature (185)..(185): n is a, c, g, t or u
  misc_feature (224)..(224): n is a, c, g, t or u
  misc_feature (246)..(246): n is a, c, g, t or u
  misc_feature (251)..(251): n is a, c, g, t or u
  misc_feature (273)..(273): n is a, c, g, t or u
  misc_feature (312)..(312): n is a, c, g, t or u
  misc_feature (339)..(339): n is a, c, g, t or u
  misc_feature (361)..(361): n is a, c, g, t or u
  misc_feature (383)..(383): n is a, c, g, t or u
  misc_feature (403)..(403): n is a, c, g, t or u
  Synthesized Sequence
mgnsvvtyntdgckagkdakmvkgksvvtyntdgckagkdakmvkgkdvvtyttdgckagkdakmvkgkdvvtyttdgckagkdakmvkgknvvtyttdgckagkdakmvkgkdvvtyntdgckagkdakmvkgkdvvtyntdgckagkdakmvkgksvvtyttdgckagkdakmvkgknvvtyntdgckagkdakmvkgkdvvtyttdgckagkdakmvkgknvvtyttdgckagkdakmvkgknvvtyntdgckagkdakmvkgksvvtyntdgckagkdakmvkgksvvtyttdgckagkdakmvkgknvvtyttdgckagkdakmvkgkdvvtyntdgckagkdakmvkgksvvtyntdgckagkdakmvkgksvvtyntdgckagkdakmvkgkdtyntsggkagrardv

SEQ ID NO: 38 - DNA, 415 bp, Artificial Sequence
  misc_feature (3)..(3): n is a, c, g, t or u
  misc_feature (9)..(9): n is a, c, g, t or u
  misc_feature (48)..(48): n is a, c, g, t or u
  misc_feature (53)..(53): n is a, c, g, t or u
  misc_feature (114)..(114): n is a, c, g, t or u
  misc_feature (180)..(180): n is a, c, g, t or u
  misc_feature (185)..(185): n is a, c, g, t or u
  misc_feature (207)..(207): n is a, c, g, t or u
  misc_feature (246)..(246): n is a, c, g, t or u
  misc_feature (251)..(251): n is a, c, g, t or u
  misc_feature (273)..(273): n is a, c, g, t or u
  misc_feature (295)..(295): n is a, c, g, t or u
  misc_feature (334)..(334): n is a, c, g, t or u
  misc_feature (339)..(339): n is a, c, g, t or u
  misc_feature (383)..(383): n is a, c, g, t or u
  misc_feature (403)..(403): n is a, c, g, t or u
  Synthesized Sequence
mgnsvvtyntdgckagkdakmvkgksvvtyttdgckagkdakmvkgknvvtyntdgckagkdakmvkgkdvvtyttdgckagkdakmvkgkdvvtyttdgckagkdakmvkgknvvtyttdgckagkdakmvkgkdvvtyttdgckagkdakmvkgkdvvtyttdgckagkdakmvkgknvvtyntdgckagkdakmvkgkdvvtyntdgckagkdakmvkgksvvtyttdgckagkdakmvkgknvvtyntdgckagkdakmvkgksvvtyntdgckagkdakmvkgksvvtyntdgckagkdakmvkgksvvtyttdgckagkdakmvkgknvvtyntdgckagkdakmvkgkdvvtyttdgckagkdakmvkgkdvvtyntdgckagkdakmvkgkdtyntsggkagrardv

SEQ ID NO: 39 - DNA, 415 bp, Artificial Sequence
  misc_feature (3)..(3): n is a, c, g, t or u
  misc_feature (53)..(53): n is a, c, g, t or u
  misc_feature (92)..(92): n is a, c, g, t or u
  misc_feature (114)..(114): n is a, c, g, t or u
  misc_feature (136)..(136): n is a, c, g, t or u
  misc_feature (158)..(158): n is a, c, g, t or u
  misc_feature (180)..(180): n is a, c, g, t or u
  misc_feature (224)..(224): n is a, c, g, t or u
  misc_feature (229)..(229): n is a, c, g, t or u
  misc_feature (251)..(251): n is a, c, g, t or u
  misc_feature (290)..(290): n is a, c, g, t or u
  misc_feature (295)..(295): n is a, c, g, t or u
  misc_feature (317)..(317): n is a, c, g, t or u
  misc_feature (361)..(361): n is a, c, g, t or u
  misc_feature (400)..(400): n is a, c, g, t or u
  misc_feature (403)..(403): n is a, c, g, t or u
  Synthesized Sequence
mgnsvvtyttdgckagkdakmvkgkdvvtyttdgckagkdakmvkgkdvvtyntdgckagkdakmvkgksvvtyttdgckagkdakmvkgknvvtyttdgckagkdakmvkgknvvtyttdgckagkdakmvkgknvvtyttdgckagkdakmvkgknvvtyttdgckagkdakmvkgknvvtyttdgckagkdakmvkgkdvvtyttdgckagkdakmvkgknvvtyntdgckagkdakmvkgkdvvtyntdgckagkdakmvkgksvvtyttdgckagkdakmvkgknvvtyntdgckagkdakmvkgksvvtyntdgckagkdakmvkgkdvvtyttdgckagkdakmvkgkdvvtyntdgckagkdakmvkgkdvvtyttdgckagkdakmvkgkntyntsggkagrardv

SEQ ID NO: 40 - DNA, 423 bp, Artificial Sequence
  misc_feature (3)..(3): n is a, c, g, t or u
  misc_feature (52)..(52): n is a, c, g, t or u
  misc_feature (77)..(77): n is a, c, g, t or u
  misc_feature (82)..(82): n is a, c, g, t or u
  misc_feature (145)..(145): n is a, c, g, t or u
  misc_feature (170)..(170): n is a, c, g, t or u
  misc_feature (175)..(175): n is a, c, g, t or u
  misc_feature (196)..(196): n is a, c, g, t or u
  misc_feature (216)..(216): n is a, c, g, t or u
  misc_feature (237)..(237): n is a, c, g, t or u
  misc_feature (257)..(257): n is a, c, g, t or u
  misc_feature (277)..(277): n is a, c, g, t or u
  misc_feature (298)..(298): n is a, c, g, t or u
  misc_feature (408)..(408): n is a, c, g, t or u
  misc_feature (411)..(411): n is a, c, g, t or u
  Synthesized Sequence
mgnsvvtyttdgckagkvdadmkrgkdvvtyttdgckagdvdakmrskgvknvvtyttdgckagdvdakmrskgvknvvtyntdgckagrdamkgkdvvtyttdgckagkvdadmkrgkdvvtyttdgckagdvdakmrskgvknvvtyttdgckagdvdakmrskgvknvvtyntdgcksgkakkmkgtsvvtyntdgckagrdamkgkdvvtyntdgcksgkakkmkgtsvvtyntdgckagrdamkgkdvvtyntdgckagrdamkgkdvvtyntdgcksgkakkmkgtsvvtyntdgcksgkakkmkgtsvvtyttdgckagkvdadmkrgkdvvtyttdgckagkvdadmkrgkdvvtyttdgckagkvdadmkrgkdvvtyttdgckagdvdakmrskgvkntyntsggkagrardv

SEQ ID NO: 41 - DNA, 435 bp, Artificial Sequence
  misc_feature (3)..(3): n is a, c, g, t or u
  misc_feature (52)..(52): n is a, c, g, t or u
  misc_feature (100)..(100): n is a, c, g, t or u
  misc_feature (171)..(171): n is a, c, g, t or u
  misc_feature (196)..(196): n is a, c, g, t or u
  misc_feature (224)..(224): n is a, c, g, t or u
  misc_feature (245)..(245): n is a, c, g, t or u
  misc_feature (266)..(266): n is a, c, g, t or u
  misc_feature (329)..(329): n is a, c, g, t or u
  misc_feature (377)..(377): n is a, c, g, t or u
  misc_feature (405)..(405): n is a, c, g, t or u
  misc_feature (423)..(423): n is a, c, g, t or u
  Synthesized Sequence
mgnsvvtyttdgckagkvdadmkrgkdvvtyttdgckagdvdakmrskgvknvvtyttdgckagkvdadmkrgkdvvtyttdgckagdvdakmrskgvknvvtyttdgckagkvdadmkrgkdvvtyttdgckagkvdadmkrgkdvvtyttdgckagdvdakmrskgvknvvtyttdgckagdvdakmrskgvknvvtyttdgckagkvdadmkrgkdvvtyntdgcksgkakkmkgtsvvtyntdgcksgkakkmkgtsvvtyntdgckagrdamkgkdvvtyttdgckagkvdadmkrgkdvvtyttdgckagdvdakmrskgvknvvtyttdgckagkvdadmkrgkdvvtyttdgckagdvdakmrskgvknvvtyttdgckagkvdadmkrgkdvvtyntdgckagrdamkgkdtyntsggkagrardv

SEQ ID NO: 42 - DNA, 419 bp, Artificial Sequence
  misc_feature (3)..(3): n is a, c, g, t or u
  misc_feature (9)..(9): n is a, c, g, t or u
  misc_feature (30)..(30): n is a, c, g, t or u
  misc_feature (93)..(93): n is a, c, g, t or u
  misc_feature (121)..(121): n is a, c, g, t or u
  misc_feature (141)..(141): n is a, c, g, t or u
  misc_feature (182)..(182): n is a, c, g, t or u
  misc_feature (187)..(187): n is a, c, g, t or u
  misc_feature (227)..(227): n is a, c, g, t or u
  misc_feature (252)..(252): n is a, c, g, t or u
  misc_feature (257)..(257): n is a, c, g, t or u
  misc_feature (278)..(278): n is a, c, g, t or u
  misc_feature (319)..(319): n is a, c, g, t or u
  misc_feature (347)..(347): n is a, c, g, t or u
  misc_feature (368)..(368): n is a, c, g, t or u
  misc_feature (389)..(389): n is a, c, g, t or u
  misc_feature (407)..(407): n is a, c, g, t or u
  Synthesized Sequence
mgnsvvtyntdgcksgkakkmkgtsvvtyntdgckagrdamkgkdvvtyttdgckagkvdadmkrgkdvvtyttdgckagdvdakmrskgvknvvtyttdgckagkvdadmkrgkdvvtyntdgckagrdamkgkdvvtyntdgcksgkakkmkgtsvvtyttdgckagdvdakmrskgvknvvtyntdgckagrdamkgkdvvtyttdgckagdvdakmrskgvknvvtyttdgckagdvdakmrskgvknvvtyntdgcksgkakkmkgtsvvtyntdgcksgkakkmkgtsvvtyttdgckagdvdakmrskgvknvvtyttdgckagkvdadmkrgkdvvtyntdgcksgkakkmkgtsvvtyntdgcksgkakkmkgtsvvtyntdgckagrdamkgkdtyntsggkagrardv

SEQ ID NO: 43 - DNA, 421 bp, Artificial Sequence
  misc_feature (3)..(3): n is a, c, g, t or u
  misc_feature (9)..(9): n is a, c, g, t or u
  misc_feature (50)..(50): n is a, c, g, t or u
  misc_feature (55)..(55): n is a, c, g, t or u
  misc_feature (118)..(118): n is a, c, g, t or u
  misc_feature (189)..(189): n is a, c, g, t or u
  misc_feature (194)..(194): n is a, c, g, t or u
  misc_feature (214)..(214): n is a, c, g, t or u
  misc_feature (255)..(255): n is a, c, g, t or u
  misc_feature (260)..(260): n is a, c, g, t or u
  misc_feature (281)..(281): n is a, c, g, t or u
  misc_feature (302)..(302): n is a, c, g, t or u
  misc_feature (343)..(343): n is a, c, g, t or u
  misc_feature (348)..(348): n is a, c, g, t or u
  misc_feature (391)..(391): n is a, c, g, t or u
  misc_feature (409)..(409): n is a, c, g, t or u
  Synthesized Sequence
mgnsvvtyntdgcksgkakkmkgtsvvtyttdgckagdvdakmrskgvknvvtyntdgckagrdamkgkdvvtyttdgckagkvdadmkrgkdvvtyttdgckagdvdakmrskgvknvvtyttdgckagkvdadmkrgkdvvtyttdgckagkvdadmkrgkdvvtyttdgckagdvdakmrskgvknvvtyntdgckagrdamkgkdvvtyntdgcksgkakkmkgtsvvtyttdgckagdvdakmrskgvknvvtyntdgcksgkakkmkgtsvvtyntdgcksgkakkmkgtsvvtyntdgcksgkakkmkgtsvvtyttdgckagdvdakmrskgvknvvtyntdgckagrdamkgkdvvtyttdgckagkvdadmkrgkdvvtyntdgckagrdamkgkdtyntsggkagrardv

SEQ ID NO: 44 - DNA, 434 bp, Artificial Sequence
  misc_feature (3)..(3): n is a, c, g, t or u
  misc_feature (55)..(55): n is a, c, g, t or u
  misc_feature (96)..(96): n is a, c, g, t or u
  misc_feature (121)..(121): n is a, c, g, t or u
  misc_feature (146)..(146): n is a, c, g, t or u
  misc_feature (171)..(171): n is a, c, g, t or u
  misc_feature (196)..(196): n is a, c, g, t or u
  misc_feature (244)..(244): n is a, c, g, t or u
  misc_feature (249)..(249): n is a, c, g, t or u
  misc_feature (269)..(269): n is a, c, g, t or u
  misc_feature (310)..(310): n is a, c, g, t or u
  misc_feature (315)..(315): n is a, c, g, t or u
  misc_feature (336)..(336): n is a, c, g, t or u
  misc_feature (379)..(379): n is a, c, g, t or u
  misc_feature (419)..(419): n is a, c, g, t or u
  misc_feature (422)..(422): n is a, c, g, t or u
  Synthesized Sequence
mgnsvvtyttdgckagkvdadmkrgkdvvtyttdgckagkvdadmkrgkdvvtyntdgcksgkakkmkgtsvvtyttdgckagdvdakmrskgvknvvtyttdgckagdvdakmrskgvknvvtyttdgckagdvdakmrskgvknvvtyttdgckagdvdakmrskgvknvvtyttdgckagdvdakmrskgvknvvtyttdgckagkvdadmkrgkdvvtyttdgckagdvdakmrskgvknvvtyntdgckagrdamkgkdvvtyntdgcksgkakkmkgtsvvtyttdgckagdvdakmrskgvknvvtyntdgcksgkakkmkgtsvvtyntdgckagrdamkgkdvvtyttdgckagkvdadmkrgkdvvtyntdgckagrdamkgkdvvtyttdgckagdvdakmrskgvkntyntsggkagrardv

SEQ ID NO: 45 - DNA, 427 bp, Artificial Sequence
  misc_feature (3)..(3): n is a, c, g, t or u
  misc_feature (9)..(9): n is a, c, g, t or u
  misc_feature (50)..(50): n is a, c, g, t or u
  misc_feature (75)..(75): n is a, c, g, t or u
  misc_feature (80)..(80): n is a, c, g, t or u
  misc_feature (121)..(121): n is a, c, g, t or u
  misc_feature (126)..(126): n is a, c, g, t or u
  misc_feature (146)..(146): n is a, c, g, t or u
  misc_feature (187)..(187): n is a, c, g, t or u
  misc_feature (215)..(215): n is a, c, g, t or u
  misc_feature (235)..(235): n is a, c, g, t or u
  misc_feature (256)..(256): n is a, c, g, t or u
  misc_feature (319)..(319): n is a, c, g, t or u
  misc_feature (324)..(324): n is a, c, g, t or u
  misc_feature (364)..(364): n is a, c, g, t or u
  misc_feature (389)..(389): n is a, c, g, t or u
  misc_feature (415)..(415): n is a, c, g, t or u
  Synthesized Sequence
mgnsvvtyntdgcksgkakkmkgtsvvtyttdgckagdvdakmrskgvknvvtyttdgckagdvdakmrskgvknvvtyntdgcksgkakkmkgtsvvtyttdgckagdvdakmrskgvknvvtyntdgckagrdamkgkdvvtyntdgcksgkakkmkgtsvvtyttdgckagdvdakmrskgvknvvtyttdgckagkvdadmkrgkdvvtyntdgckagrdamkgkdvvtyntdgcksgkakkmkgtsvvtyntdgckagrdamkgkdvvtyttdgckagkvdadmkrgkdvvtyttdgckagdvdakmrskgvknvvtyntdgckagrdamkgkdvvtyttdgckagdvdakmrskgvknvvtyttdgckagdvdakmrskgvknvvtyttdgckagkvdadmkrgkdtyntsggkagrardv

SEQ ID NO: 46 - DNA, 18 bp, Artificial Sequence
  Synthesized Sequence
gaaugaacucuuccggga

SEQ ID NO: 47 - DNA, 18 bp, Artificial Sequence
  Synthesized Sequence
gagaggaagccugagagu

SEQ ID NO: 48 - DNA, 18 bp, Artificial Sequence
  Synthesized Sequence
cugagucauaaccagccu

SEQ ID NO: 49 - DNA, 18 bp, Artificial Sequence
  Synthesized Sequence
caugaggaucacccaugu

SEQ ID NO: 50 - DNA, 18 bp, Artificial Sequence
  Synthesized Sequence
ggcaaaaagaucacugua

SEQ ID NO: 51 - DNA, 18 bp, Artificial Sequence
  Synthesized Sequence
caacaucagucugauaag

SEQ ID NO: 52 - DNA, 18 bp, Artificial Sequence
  Synthesized Sequence
cacaauguggccgaggac

SEQ ID NO: 53 - DNA, 18 bp, Artificial Sequence
  Synthesized Sequence
aagccaguuuucauuuug

SEQ ID NO: 54 - DNA, 18 bp, Artificial Sequence
  Synthesized Sequence
cacuauuuaaguuaucaa

SEQ ID NO: 55 - DNA, 18 bp, Artificial Sequence
  Synthesized Sequence
caaacuuucacuuugaaa

SEQ ID NO: 56 - DNA, 18 bp, Artificial Sequence
  Synthesized Sequence
gguggugaggcccugggc

SEQ ID NO: 57 - DNA, 18 bp, Artificial Sequence
  Synthesized Sequence
gacucaggaaucggcucu

SEQ ID NO: 58 - DNA, 18 bp, Artificial Sequence
  Synthesized Sequence
caacaucaaagacaccau

SEQ ID NO: 59 - DNA, 18 bp, Artificial Sequence
  Synthesized Sequence
gucagaggguucuggauu

SEQ ID NO: 60 - DNA, 18 bp, Artificial Sequence
  Synthesized Sequence
gcagauaauuaauaagaa

SEQ ID NO: 61 - DNA, 18 bp, Artificial Sequence
  Synthesized Sequence
aaggauaauaucaaacac

SEQ ID NO: 62 - DNA, 18 bp, Artificial Sequence
  Synthesized Sequence
uuaucagacugauguuga

SEQ ID NO: 63 - DNA, 18 bp, Artificial Sequence
  Synthesized Sequence
gguuagagauacagugug

SEQ ID NO: 64 - DNA, 18 bp, Artificial Sequence
  Synthesized Sequence
gugggggugguaggaaau

SEQ ID NO: 65 - DNA, 18 bp, Artificial Sequence
  Synthesized Sequence
gugauguggaguuaaggc

SEQ ID NO: 66 - DNA, 18 bp, Artificial Sequence
  Synthesized Sequence
ggaagagugucuggagca

SEQ ID NO: 67 - DNA, 18 bp, Artificial Sequence
  Synthesized Sequence
ugaugaugaugaugauga

SEQ ID NO: 68 - DNA, 18 bp, Artificial Sequence
  Synthesized Sequence
ucuuugccauuucccaua

SEQ ID NO: 69 - DNA, 18 bp, Artificial Sequence
  Synthesized Sequence
cccauagaugugacaagc

SEQ ID NO: 70 - protein, 869 aa, Artificial Sequence
  Synthesized Sequence
MAGVFTLEDFVGDWRQTAGYNLDQVLEQGGVSSLFQNLGVSVTPIQRIVLSGENGLKIDIHVIIPYEGLSGDQMGQIEKIFKVVYPVDDHHFKVILHYGTLVIDGVTPNMIDYFGRPYEGIAVFDGKKITVTGTLWNGNKIIDERLINPDGSLLFRVTINGVTGWRLCERILAGGGGSLVPRGSGGGGSSRLHMGNSVVTYNTLIDGLCKSGKIEEALKLFKEMEEKGITPSVVTYTTLIDGLCKAGDVDEALELFKEMRSKGVKPNVVTYTTLIDGLCKAGDVDEALELFKEMRSKGVKPNVVTYNTLIDGLCKSGKIEEALKLFKEMEEKGITPSVVTYTTLIDGLCKAGDVDEALELFKEMRSKGVKPNVVTYNTLIDGLCKAGRLDEAEELLEEMEEKGIKPDVVTYNTLIDGLCKSGKIEEALKLFKEMEEKGITPSVVTYTTLIDGLCKAGDVDEALELFKEMRSKGVKPNVVTYTTLIDGLCKAGKVDEALELFDEMKERGIKPDVVTYNTLIDGLCKAGRLDEAEELLEEMEEKGIKPDVVTYNTLIDGLCKSGKIEEALKLFKEMEEKGITPSVVTYNTLIDGLCKAGRLDEAEELLEEMEEKGIKPDVVTYTTLIDGLCKAGKVDEALELFDEMKERGIKPDVVTYTTLIDGLCKAGDVDEALELFKEMRSKGVKPNVVTYNTLIDGLCKAGRLDEAEELLEEMEEKGIKPDVVTYTTLIDGLCKAGDVDEALELFKEMRSKGVKPNVVTYTTLIDGLCKAGDVDEALELFKEMRSKGVKPNVVTYTTLIDGLCKAGKVDEALELFDEMKERGIKPDELTYNTLISGLGKAGRARDPPVLSSGSGGSGGGGHHHHHHGR

SEQ ID NO: 71 - protein, 869 aa, Artificial Sequence
  Synthesized Sequence
MAGVFTLEDFVGDWRQTAGYNLDQVLEQGGVSSLFQNLGVSVTPIQRIVLSGENGLKIDIHVIIPYEGLSGDQMGQIEKIFKVVYPVDDHHFKVILHYGTLVIDGVTPNMIDYFGRPYEGIAVFDGKKITVTGTLWNGNKIIDERLINPDGSLLFRVTINGVTGWRLCERILAGGGGSLVPRGSGGGGSSRLHMGNSVVTYNTLIDGLCKSGKIEEALKLFKEMEEKGITPSVVTYTTLIDGLCKAGDVDEALELFKEMRSKGVKPNVVTYNTLIDGLCKSGKIEEALKLFKEMEEKGITPSVVTYTTLIDGLCKAGDVDEALELFKEMRSKGVKPNVVTYTTLIDGLCKAGDVDEALELFKEMRSKGVKPNVVTYNTLIDGLCKAGRLDEAEELLEEMEEKGIKPDVVTYTTLIDGLCKAGKVDEALELFDEMKERGIKPDVVTYNTLIDGLCKAGRLDEAEELLEEMEEKGIKPDVVTYTTLIDGLCKAGKVDEALELFDEMKERGIKPDVVTYTTLIDGLCKAGKVDEALELFDEMKERGIKPDVVTYNTLIDGLCKSGKIEEALKLFKEMEEKGITPSVVTYNTLIDGLCKSGKIEEALKLFKEMEEKGITPSVVTYTTLIDGLCKAGKVDEALELFDEMKERGIKPDVVTYTTLIDGLCKAGDVDEALELFKEMRSKGVKPNVVTYTTLIDGLCKAGKVDEALELFDEMKERGIKPDVVTYTTLIDGLCKAGKVDEALELFDEMKERGIKPDVVTYTTLIDGLCKAGDVDEALELFKEMRSKGVKPNVVTYNTLIDGLCKSGKIEEALKLFKEMEEKGITPSELTYNTLISGLGKAGRARDPPVLSSGSGGSGGGGHHHHHHGR

SEQ ID NO: 72 - protein, 869 aa, Artificial Sequence
  Synthesized Sequence
MAGVFTLEDFVGDWRQTAGYNLDQVLEQGGVSSLFQNLGVSVTPIQRIVLSGENGLKIDIHVIIPYEGLSGDQMGQIEKIFKVVYPVDDHHFKVILHYGTLVIDGVTPNMIDYFGRPYEGIAVFDGKKITVTGTLWNGNKIIDERLINPDGSLLFRVTINGVTGWRLCERILAGGGGSLVPRGSGGGGSSRLHMGNSVVTYTTLIDGLCKAGDVDEALELFKEMRSKGVKPNVVTYTTLIDGLCKAGDVDEALELFKEMRSKGVKPNVVTYTTLIDGLCKAGKVDEALELFDEMKERGIKPDVVTYNTLIDGLCKSGKIEEALKLFKEMEEKGITPSVVTYNTLIDGLCKSGKIEEALKLFKEMEEKGITPSVVTYTTLIDGLCKAGDVDEALELFKEMRSKGVKPNVVTYTTLIDGLCKAGKVDEALELFDEMKERGIKPDVVTYNTLIDGLCKAGRLDEAEELLEEMEEKGIKPDVVTYNTLIDGLCKAGRLDEAEELLEEMEEKGIKPDVVTYNTLIDGLCKAGRLDEAEELLEEMEEKGIKPDVVTYNTLIDGLCKAGRLDEAEELLEEMEEKGIKPDVVTYNTLIDGLCKSGKIEEALKLFKEMEEKGITPSVVTYTTLIDGLCKAGDVDEALELFKEMRSKGVKPNVVTYNTLIDGLCKAGRLDEAEELLEEMEEKGIKPDVVTYNTLIDGLCKAGRLDEAEELLEEMEEKGIKPDVVTYNTLIDGLCKAGRLDEAEELLEEMEEKGIKPDVVTYNTLIDGLCKAGRLDEAEELLEEMEEKGIKPDVVTYTTLIDGLCKAGKVDEALELFDEMKERGIKPDELTYNTLISGLGKAGRARDPPVLSSGSGGSGGGGHHHHHHGR

SEQ ID NO: 73 - protein, 869 aa, Artificial Sequence
  Synthesized Sequence
MAGVFTLEDFVGDWRQTAGYNLDQVLEQGGVSSLFQNLGVSVTPIQRIVLSGENGLKIDIHVIIPYEGLSGDQMGQIEKIFKVVYPVDDHHFKVILHYGTLVIDGVTPNMIDYFGRPYEGIAVFDGKKITVTGTLWNGNKIIDERLINPDGSLLFRVTINGVTGWRLCERILAGGGGSLVPRGSGGGGSSRLHMGNSVVTYNTLIDGLCKSGKIEEALKLFKEMEEKGITPSVVTYTTLIDGLCKAGDVDEALELFKEMRSKGVKPNVVTYNTLIDGLCKSGKIEEALKLFKEMEEKGITPSVVTYNTLIDGLCKAGRLDEAEELLEEMEEKGIKPDVVTYTTLIDGLCKAGDVDEALELFKEMRSKGVKPNVVTYNTLIDGLCKAGRLDEAEELLEEMEEKGIKPDVVTYNTLIDGLCKAGRLDEAEELLEEMEEKGIKPDVVTYNTLIDGLCKAGRLDEAEELLEEMEEKGIKPDVVTYTTLIDGLCKAGDVDEALELFKEMRSKGVKPNVVTYTTLIDGLCKAGDVDEALELFKEMRSKGVKPNVVTYTTLIDGLCKAGKVDEALELFDEMKERGIKPDVVTYNTLIDGLCKAGRLDEAEELLEEMEEKGIKPDVVTYNTLIDGLCKAGRLDEAEELLEEMEEKGIKPDVVTYTTLIDGLCKAGDVDEALELFKEMRSKGVKPNVVTYNTLIDGLCKAGRLDEAEELLEEMEEKGIKPDVVTYNTLIDGLCKSGKIEEALKLFKEMEEKGITPSVVTYTTLIDGLCKAGDVDEALELFKEMRSKGVKPNVVTYTTLIDGLCKAGDVDEALELFKEMRSKGVKPNELTYNTLISGLGKAGRARDPPVLSSGSGGSGGGGHHHHHHGR

SEQ ID NO: 74 - protein, 869 aa, Artificial Sequence
  Synthesized Sequence
MAGVFTLEDFVGDWRQTAGYNLDQVLEQGGVSSLFQNLGVSVTPIQRIVLSGENGLKIDIHVIIPYEGLSGDQMGQIEKIFKVVYPVDDHHFKVILHYGTLVIDGVTPNMIDYFGRPYEGIAVFDGKKITVTGTLWNGNKIIDERLINPDGSLLFRVTINGVTGWRLCERILAGGGGSLVPRGSGGGGSSRLHMGNSVVTYNTLIDGLCKSGKIEEALKLFKEMEEKGITPSVVTYTTLIDGLCKAGDVDEALELFKEMRSKGVKPNVVTYTTLIDGLCKAGDVDEALELFKEMRSKGVKPNVVTYTTLIDGLCKAGDVDEALELFKEMRSKGVKPNVVTYNTLIDGLCKSGKIEEALKLFKEMEEKGITPSVVTYNTLIDGLCKAGRLDEAEELLEEMEEKGIKPDVVTYNTLIDGLCKAGRLDEAEELLEEMEEKGIKPDVVTYNTLIDGLCKAGRLDEAEELLEEMEEKGIKPDVVTYNTLIDGLCKSGKIEEALKLFKEMEEKGITPSVVTYTTLIDGLCKAGDVDEALELFKEMRSKGVKPNVVTYNTLIDGLCKSGKIEEALKLFKEMEEKGITPSVVTYNTLIDGLCKAGRLDEAEELLEEMEEKGIKPDVVTYNTLIDGLCKAGRLDEAEELLEEMEEKGIKPDVVTYNTLIDGLCKAGRLDEAEELLEEMEEKGIKPDVVTYTTLIDGLCKAGKVDEALELFDEMKERGIKPDVVTYTTLIDGLCKAGDVDEALELFKEMRSKGVKPNVVTYTTLIDGLCKAGDVDEALELFKEMRSKGVKPNVVTYTTLIDGLCKAGDVDEALELFKEMRSKGVKPNELTYNTLISGLGKAGRARDPPVLSSGSGGSGGGGHHHHHHGR

SEQ ID NO: 75 - protein, 869 aa, Artificial Sequence
  Synthesized Sequence
MAGVFTLEDFVGDWRQTAGYNLDQVLEQGGVSSLFQNLGVSVTPIQRIVLSGENGLKIDIHVIIPYEGLSGDQMGQIEKIFKVVYPVDDHHFKVILHYGTLVIDGVTPNMIDYFGRPYEGIAVFDGKKITVTGTLWNGNKIIDERLINPDGSLLFRVTINGVTGWRLCERILAGGGGSLVPRGSGGGGSSRLHMGNSVVTYTTLIDGLCKAGKVDEALELFDEMKERGIKPDVVTYTTLIDGLCKAGKVDEALELFDEMKERGIKPDVVTYNTLIDGLCKAGRLDEAEELLEEMEEKGIKPDVVTYTTLIDGLCKAGKVDEALELFDEMKERGIKPDVVTYTTLIDGLCKAGKVDEALELFDEMKERGIKPDVVTYNTLIDGLCKAGRLDEAEELLEEMEEKGIKPDVVTYTTLIDGLCKAGKVDEALELFDEMKERGIKPDVVTYTTLIDGLCKAGDVDEALELFKEMRSKGVKPNVVTYTTLIDGLCKAGKVDEALELFDEMKERGIKPDVVTYTTLIDGLCKAGKVDEALELFDEMKERGIKPDVVTYNTLIDGLCKSGKIEEALKLFKEMEEKGITPSVVTYNTLIDGLCKSGKIEEALKLFKEMEEKGITPSVVTYNTLIDGLCKSGKIEEALKLFKEMEEKGITPSVVTYNTLIDGLCKAGRLDEAEELLEEMEEKGIKPDVVTYTTLIDGLCKAGKVDEALELFDEMKERGIKPDVVTYTTLIDGLCKAGKVDEALELFDEMKERGIKPDVVTYTTLIDGLCKAGKVDEALELFDEMKERGIKPDVVTYNTLIDGLCKSGKIEEALKLFKEMEEKGITPSELTYNTLISGLGKAGRARDPPVLSSGSGGSGGGGHHHHHHGR

SEQ ID NO: 76 - protein, 869 aa, Artificial Sequence
  Synthesized Sequence
MAGVFTLEDFVGDWRQTAGYNLDQVLEQGGVSSLFQNLGVSVTPIQRIVLSGENGLKIDIHVIIPYEGLSGDQMGQIEKIFKVVYPVDDHHFKVILHYGTLVIDGVTPNMIDYFGRPYEGIAVFDGKKITVTGTLWNGNKIIDERLINPDGSLLFRVTINGVTGWRLCERILAGGGGSLVPRGSGGGGSSRLHMGNSVVTYTTLIDGLCKAGKVDEALELFDEMKERGIKPDVVTYTTLIDGLCKAGDVDEALELFKEMRSKGVKPNVVTYNTLIDGLCKSGKIEEALKLFKEMEEKGITPSVVTYNTLIDGLCKAGRLDEAEELLEEMEEKGIKPDVVTYNTLIDGLCKSGKIEEALKLFKEMEEKGITPSVVTYTTLIDGLCKAGDVDEALELFKEMRSKGVKPNVVTYTTLIDGLCKAGKVDEALELFDEMKERGIKPDVVTYTTLIDGLCKAGKVDEALELFDEMKERGIKPDVVTYTTLIDGLCKAGDVDEALELFKEMRSKGVKPNVVTYTTLIDGLCKAGDVDEALELFKEMRSKGVKPNVVTYNTLIDGLCKAGRLDEAEELLEEMEEKGIKPDVVTYNTLIDGLCKSGKIEEALKLFKEMEEKGITPSVVTYTTLIDGLCKAGKVDEALELFDEMKERGIKPDVVTYTTLIDGLCKAGKVDEALELFDEMKERGIKPDVVTYNTLIDGLCKSGKIEEALKLFKEMEEKGITPSVVTYNTLIDGLCKAGRLDEAEELLEEMEEKGIKPDVVTYNTLIDGLCKSGKIEEALKLFKEMEEKGITPSVVTYNTLIDGLCKAGRLDEAEELLEEMEEKGIKPDELTYNTLISGLGKAGRARDPPVLSSGSGGSGGGGHHHHHHGR

SEQ ID NO: 77 - protein, 869 aa, Artificial Sequence
  Synthesized Sequence
MAGVFTLEDFVGDWRQTAGYNLDQVLEQGGVSSLFQNLGVSVTPIQRIVLSGENGLKIDIHVIIPYEGLSGDQMGQIEKIFKVVYPVDDHHFKVILHYGTLVIDGVTPNMIDYFGRPYEGIAVFDGKKITVTGTLWNGNKIIDERLINPDGSLLFRVTINGVTGWRLCERILAGGGGSLVPRGSGGGGSSRLHMGNSVVTYNTLIDGLCKSGKIEEALKLFKEMEEKGITPSVVTYTTLIDGLCKAGDVDEALELFKEMRSKGVKPNVVTYTTLIDGLCKAGDVDEALELFKEMRSKGVKPNVVTYNTLIDGLCKSGKIEEALKLFKEMEEKGITPSVVTYTTLIDGLCKAGDVDEALELFKEMRSKGVKPNVVTYNTLIDGLCKAGRLDEAEELLEEMEEKGIKPDVVTYNTLIDGLCKSGKIEEALKLFKEMEEKGITPSVVTYTTLIDGLCKAGDVDEALELFKEMRSKGVKPNVVTYTTLIDGLCKAGDVDEALELFKEMRSKGVKPNVVTYTTLIDGLCKAGDVDEALELFKEMRSKGVKPNVVTYTTLIDGLCKAGKVDEALELFDEMKERGIKPDVVTYTTLIDGLCKAGDVDEALELFKEMRSKGVKPNVVTYNTLIDGLCKSGKIEEALKLFKEMEEKGITPSVVTYTTLIDGLCKAGDVDEALELFKEMRSKGVKPNVVTYNTLIDGLCKSGKIEEALKLFKEMEEKGITPSVVTYNTLIDGLCKSGKIEEALKLFKEMEEKGITPSVVTYTTLIDGLCKAGDVDEALELFKEMRSKGVKPNVVTYNTLIDGLCKAGRLDEAEELLEEMEEKGIKPDELTYNTLISGLGKAGRARDPPVLSSGSGGSGGGGHHHHHHGR

SEQ ID NO: 78 - protein, 869 aa, Artificial Sequence
  Synthesized Sequence
MAGVFTLEDFVGDWRQTAGYNLDQVLEQGGVSSLFQNLGVSVTPIQRIVLSGENGLKIDIHVIIPYEGLSGDQMGQIEKIFKVVYPVDDHHFKVILHYGTLVIDGVTPNMIDYFGRPYEGIAVFDGKKITVTGTLWNGNKIIDERLINPDGSLLFRVTINGVTGWRLCERILAGGGGSLVPRGSGGGGSSRLHMGNSVVTYTTLIDGLCKAGKVDEALELFDEMKERGIKPDVVTYNTLIDGLCKAGRLDEAEELLEEMEEKGIKPDVVTYNTLIDGLCKSGKIEEALKLFKEMEEKGITPSVVTYTTLIDGLCKAGDVDEALELFKEMRSKGVKPNVVTYTTLIDGLCKAGKVDEALELFDEMKERGIKPDVVTYTTLIDGLCKAGDVDEALELFKEMRSKGVKPNVVTYTTLIDGLCKAGKVDEALELFDEMKERGIKPDVVTYTTLIDGLCKAGKVDEALELFDEMKERGIKPDVVTYTTLIDGLCKAGKVDEALELFDEMKERGIKPDVVTYNTLIDGLCKAGRLDEAEELLEEMEEKGIKPDVVTYNTLIDGLCKAGRLDEAEELLEEMEEKGIKPDVVTYNTLIDGLCKSGKIEEALKLFKEMEEKGITPSVVTYNTLIDGLCKAGRLDEAEELLEEMEEKGIKPDVVTYTTLIDGLCKAGKVDEALELFDEMKERGIKPDVVTYTTLIDGLCKAGKVDEALELFDEMKERGIKPDVVTYTTLIDGLCKAGDVDEALELFKEMRSKGVKPNVVTYNTLIDGLCKAGRLDEAEELLEEMEEKGIKPDVVTYNTLIDGLCKAGRLDEAEELLEEMEEKGIKPDELTYNTLISGLGKAGRARDPPVLSSGSGGSGGGGHHHHHHGR

SEQ ID NO: 79 - protein, 869 aa, Artificial Sequence
  Synthesized Sequence
MAGVFTLEDFVGDWRQTAGYNLDQVLEQGGVSSLFQNLGVSVTPIQRIVLSGENGLKIDIHVIIPYEGLSGDQMGQIEKIFKVVYPVDDHHFKVILHYGTLVIDGVTPNMIDYFGRPYEGIAVFDGKKITVTGTLWNGNKIIDERLINPDGSLLFRVTINGVTGWRLCERILAGGGGSLVPRGSGGGGSSRLHMGNSVVTYTTLIDGLCKAGKVDEALELFDEMKERGIKPDVVTYNTLIDGLCKSGKIEEALKLFKEMEEKGITPSVVTYTTLIDGLCKAGDVDEALELFKEMRSKGVKPNVVTYTTLIDGLCKAGKVDEALELFDEMKERGIKPDVVTYTTLIDGLCKAGDVDEALELFKEMRSKGVKPNVVTYNTLIDGLCKAGRLDEAEELLEEMEEKGIKPDVVTYTTLIDGLCKAGDVDEALELFKEMRSKGVKPNVVTYTTLIDGLCKAGDVDEALELFKEMRSKGVKPNVVTYNTLIDGLCKAGRLDEAEELLEEMEEKGIKPDVVTYNTLIDGLCKAGRLDEAEELLEEMEEKGIKPDVVTYTTLIDGLCKAGDVDEALELFKEMRSKGVKPNVVTYTTLIDGLCKAGDVDEALELFKEMRSKGVKPNVVTYNTLIDGLCKAGRLDEAEELLEEMEEKGIKPDVVTYTTLIDGLCKAGDVDEALELFKEMRSKGVKPNVVTYTTLIDGLCKAGDVDEALELFKEMRSKGVKPNVVTYTTLIDGLCKAGKVDEALELFDEMKERGIKPDVVTYTTLIDGLCKAGDVDEALELFKEMRSKGVKPNVVTYTTLIDGLCKAGDVDEALELFKEMRSKGVKPNELTYNTLISGLGKAGRARDPPVLSSGSGGSGGGGHHHHHHGR

SEQ ID NO: 80 - protein, 869 aa, Artificial Sequence
  Synthesized Sequence
MAGVFTLEDFVGDWRQTAGYNLDQVLEQGGVSSLFQNLGVSVTPIQRIVLSGENGLKIDIHVIIPYEGLSGDQMGQIEKIFKVVYPVDDHHFKVILHYGTLVIDGVTPNMIDYFGRPYEGIAVFDGKKITVTGTLWNGNKIIDERLINPDGSLLFRVTINGVTGWRLCERILAGGGGSLVPRGSGGGGSSRLHMGNSVVTYTTLIDGLCKAGDVDEALELFKEMRSKGVKPNVVTYTTLIDGLCKAGDVDEALELFKEMRSKGVKPNVVTYTTLIDGLCKAGKVDEALELFDEMKERGIKPDVVTYTTLIDGLCKAGKVDEALELFDEMKERGIKPDVVTYTTLIDGLCKAGDVDEALELFKEMRSKGVKPNVVTYNTLIDGLCKAGRLDEAEELLEEMEEKGIKPDVVTYTTLIDGLCKAGDVDEALELFKEMRSKGVKPNVVTYTTLIDGLCKAGDVDEALELFKEMRSKGVKPNVVTYNTLIDGLCKAGRLDEAEELLEEMEEKGIKPDVVTYTTLIDGLCKAGDVDEALELFKEMRSKGVKPNVVTYNTLIDGLCKAGRLDEAEELLEEMEEKGIKPDVVTYNTLIDGLCKSGKIEEALKLFKEMEEKGITPSVVTYTTLIDGLCKAGDVDEALELFKEMRSKGVKPNVVTYTTLIDGLCKAGDVDEALELFKEMRSKGVKPNVVTYTTLIDGLCKAGDVDEALELFKEMRSKGVKPNVVTYNTLIDGLCKSGKIEEALKLFKEMEEKGITPSVVTYTTLIDGLCKAGDVDEALELFKEMRSKGVKPNVVTYNTLIDGLCKSGKIEEALKLFKEMEEKGITPSELTYNTLISGLGKAGRARDPPVLSSGSGGSGGGGHHHHHHGR

SEQ ID NO: 81 - protein, 869 aa, Artificial Sequence
  Synthesized Sequence
MAGVFTLEDFVGDWRQTAGYNLDQVLEQGGVSSLFQNLGVSVTPIQRIVLSGENGLKIDIHVIIPYEGLSGDQMGQIEKIFKVVYPVDDHHFKVILHYGTLVIDGVTPNMIDYFGRPYEGIAVFDGKKITVTGTLWNGNKIIDERLINPDGSLLFRVTINGVTGWRLCERILAGGGGSLVPRGSGGGGSSRLHMGNSVVTYNTLIDGLCKAGRLDEAEELLEEMEEKGIKPDVVTYNTLIDGLCKAGRLDEAEELLEEMEEKGIKPDVVTYTTLIDGLCKAGDVDEALELFKEMRSKGVKPNVVTYNTLIDGLCKAGRLDEAEELLEEMEEKGIKPDVVTYNTLIDGLCKSGKIEEALKLFKEMEEKGITPSVVTYTTLIDGLCKAGDVDEALELFKEMRSKGVKPNVVTYTTLIDGLCKAGKVDEALELFDEMKERGIKPDVVTYTTLIDGLCKAGDVDEALELFKEMRSKGVKPNVVTYNTLIDGLCKSGKIEEALKLFKEMEEKGITPSVVTYNTLIDGLCKAGRLDEAEELLEEMEEKGIKPDVVTYTTLIDGLCKAGKVDEALELFDEMKERGIKPDVVTYTTLIDGLCKAGDVDEALELFKEMRSKGVKPNVVTYNTLIDGLCKAGRLDEAEELLEEMEEKGIKPDVVTYTTLIDGLCKAGKVDEALELFDEMKERGIKPDVVTYNTLIDGLCKAGRLDEAEELLEEMEEKGIKPDVVTYNTLIDGLCKAGRLDEAEELLEEMEEKGIKPDVVTYTTLIDGLCKAGKVDEALELFDEMKERGIKPDVVTYTTLIDGLCKAGDVDEALELFKEMRSKGVKPNELTYNTLISGLGKAGRARDPPVLSSGSGGSGGGGHHHHHHGR

SEQ ID NO: 82 - protein, 869 aa, Artificial Sequence
  Synthesized Sequence
MAGVFTLEDFVGDWRQTAGYNLDQVLEQGGVSSLFQNLGVSVTPIQRIVLSGENGLKIDIHVIIPYEGLSGDQMGQIEKIFKVVYPVDDHHFKVILHYGTLVIDGVTPNMIDYFGRPYEGIAVFDGKKITVTGTLWNGNKIIDERLINPDGSLLFRVTINGVTGWRLCERILAGGGGSLVPRGSGGGGSSRLHMGNSVVTYTTLIDGLCKAGKVDEALELFDEMKERGIKPDVVTYTTLIDGLCKAGKVDEALELFDEMKERGIKPDVVTYNTLIDGLCKAGRLDEAEELLEEMEEKGIKPDVVTYNTLIDGLCKAGRLDEAEELLEEMEEKGIKPDVVTYTTLIDGLCKAGDVDEALELFKEMRSKGVKPNVVTYTTLIDGLCKAGKVDEALELFDEMKERGIKPDVVTYTTLIDGLCKAGDVDEALELFKEMRSKGVKPNVVTYTTLIDGLCKAGKVDEALELFDEMKERGIKPDVVTYTTLIDGLCKAGDVDEALELFKEMRSKGVKPNVVTYNTLIDGLCKAGRLDEAEELLEEMEEKGIKPDVVTYTTLIDGLCKAGDVDEALELFKEMRSKGVKPNVVTYNTLIDGLCKSGKIEEALKLFKEMEEKGITPSVVTYTTLIDGLCKAGDVDEALELFKEMRSKGVKPNVVTYTTLIDGLCKAGKVDEALELFDEMKERGIKPDVVTYNTLIDGLCKAGRLDEAEELLEEMEEKGIKPDVVTYTTLIDGLCKAGKVDEALELFDEMKERGIKPDVVTYNTLIDGLCKAGRLDEAEELLEEMEEKGIKPDVVTYTTLIDGLCKAGKVDEALELFDEMKERGIKPDELTYNTLISGLGKAGRARDPPVLSSGSGGSGGGGHHHHHHGR

SEQ ID NO: 83 - protein, 869 aa, Artificial Sequence
  Synthesized Sequence
MAGVFTLEDFVGDWRQTAGYNLDQVLEQGGVSSLFQNLGVSVTPIQRIVLSGENGLKIDIHVIIPYEGLSGDQMGQIEKIFKVVYPVDDHHFKVILHYGTLVIDGVTPNMIDYFGRPYEGIAVFDGKKITVTGTLWNGNKIIDERLINPDGSLLFRVTINGVTGWRLCERILAGGGGSLVPRGSGGGGSSRLHMGNSVVTYTTLIDGLCKAGKVDEALELFDEMKERGIKPDVVTYNTLIDGLCKAGRLDEAEELLEEMEEKGIKPDVVTYTTLIDGLCKAGKVDEALELFDEMKERGIKPDVVTYTTLIDGLCKAGKVDEALELFDEMKERGIKPDVVTYTTLIDGLCKAGKVDEALELFDEMKERGIKPDVVTYTTLIDGLCKAGKVDEALELFDEMKERGIKPDVVTYTTLIDGLCKAGKVDEALELFDEMKERGIKPDVVTYNTLIDGLCKAGRLDEAEELLEEMEEKGIKPDVVTYTTLIDGLCKAGKVDEALELFDEMKERGIKPDVVTYTTLIDGLCKAGKVDEALELFDEMKERGIKPDVVTYNTLIDGLCKAGRLDEAEELLEEMEEKGIKPDVVTYTTLIDGLCKAGDVDEALELFKEMRSKGVKPNVVTYTTLIDGLCKAGKVDEALELFDEMKERGIKPDVVTYTTLIDGLCKAGKVDEALELFDEMKERGIKPDVVTYTTLIDGLCKAGDVDEALELFKEMRSKGVKPNVVTYTTLIDGLCKAGDVDEALELFKEMRSKGVKPNVVTYTTLIDGLCKAGDVDEALELFKEMRSKGVKPNVVTYNTLIDGLCKAGRLDEAEELLEEMEEKGIKPDELTYNTLISGLGKAGRARDPPVLSSGSGGSGGGGHHHHHHGR

SEQ ID NO: 84 - protein, 869 aa, Artificial Sequence
  Synthesized Sequence
MAGVFTLEDFVGDWRQTAGYNLDQVLEQGGVSSLFQNLGVSVTPIQRIVLSGENGLKIDIHVIIPYEGLSGDQMGQIEKIFKVVYPVDDHHFKVILHYGTLVIDGVTPNMIDYFGRPYEGIAVFDGKKITVTGTLWNGNKIIDERLINPDGSLLFRVTINGVTGWRLCERILAGGGGSLVPRGSGGGGSSRLHMGNSVVTYTTLIDGLCKAGKVDEALELFDEMKERGIKPDVVTYNTLIDGLCKAGRLDEAEELLEEMEEKGIKPDVVTYTTLIDGLCKAGKVDEALELFDEMKERGIKPDVVTYTTLIDGLCKAGDVDEALELFKEMRSKGVKPNVVTYNTLIDGLCKAGRLDEAEELLEEMEEKGIKPDVVTYTTLIDGLCKAGKVDEALELFDEMKERGIKPDVVTYNTLIDGLCKAGRLDEAEELLEEMEEKGIKPDVVTYTTLIDGLCKAGKVDEALELFDEMKERGIKPDVVTYTTLIDGLCKAGKVDEALELFDEMKERGIKPDVVTYTTLIDGLCKAGDVDEALELFKEMRSKGVKPNVVTYTTLIDGLCKAGKVDEALELFDEMKERGIKPDVVTYNTLIDGLCKAGRLDEAEELLEEMEEKGIKPDVVTYNTLIDGLCKAGRLDEAEELLEEMEEKGIKPDVVTYTTLIDGLCKAGDVDEALELFKEMRSKGVKPNVVTYTTLIDGLCKAGDVDEALELFKEMRSKGVKPNVVTYTTLIDGLCKAGKVDEALELFDEMKERGIKPDVVTYTTLIDGLCKAGKVDEALELFDEMKERGIKPDVVTYNTLIDGLCKSGKIEEALKLFKEMEEKGITPSELTYNTLISGLGKAGRARDPPVLSSGSGGSGGGGHHHHHHGR

SEQ ID NO: 85 - protein, 869 aa, Artificial Sequence
  Synthesized Sequence
MAGVFTLEDFVGDWRQTAGYNLDQVLEQGGVSSLFQNLGVSVTPIQRIVLSGENGLKIDIHVIIPYEGLSGDQMGQIEKIFKVVYPVDDHHFKVILHYGTLVIDGVTPNMIDYFGRPYEGIAVFDGKKITVTGTLWNGNKIIDERLINPDGSLLFRVTINGVTGWRLCERILAGGGGSLVPRGSGGGGSSRLHMGNSVVTYTTLIDGLCKAGKVDEALELFDEMKERGIKPDVVTYTTLIDGLCKAGKVDEALELFDEMKERGIKPDVVTYTTLIDGLCKAGDVDEALELFKEMRSKGVKPNVVTYTTLIDGLCKAGDVDEALELFKEMRSKGVKPNVVTYTTLIDGLCKAGKVDEALELFDEMKERGIKPDVVTYTTLIDGLCKAGDVDEALELFKEMRSKGVKPNVVTYTTLIDGLCKAGKVDEALELFDEMKERGIKPDVVTYNTLIDGLCKAGRLDEAEELLEEMEEKGIKPDVVTYTTLIDGLCKAGKVDEALELFDEMKERGIKPDVVTYNTLIDGLCKAGRLDEAEELLEEMEEKGIKPDVVTYNTLIDGLCKSGKIEEALKLFKEMEEKGITPSVVTYNTLIDGLCKAGRLDEAEELLEEMEEKGIKPDVVTYTTLIDGLCKAGKVDEALELFDEMKERGIKPDVVTYTTLIDGLCKAGKVDEALELFDEMKERGIKPDVVTYTTLIDGLCKAGDVDEALELFKEMRSKGVKPNVVTYTTLIDGLCKAGKVDEALELFDEMKERGIKPDVVTYNTLIDGLCKSGKIEEALKLFKEMEEKGITPSVVTYTTLIDGLCKAGDVDEALELFKEMRSKGVKPNELTYNTLISGLGKAGRARDPPVLSSGSGGSGGGGHHHHHHGR

SEQ ID NO: 86 - protein, 869 aa, Artificial Sequence
  Synthesized Sequence
MAGVFTLEDFVGDWRQTAGYNLDQVLEQGGVSSLFQNLGVSVTPIQRIVLSGENGLKIDIHVIIPYEGLSGDQMGQIEKIFKVVYPVDDHHFKVILHYGTLVIDGVTPNMIDYFGRPYEGIAVFDGKKITVTGTLWNGNKIIDERLINPDGSLLFRVTINGVTGWRLCERILAGGGGSLVPRGSGGGGSSRLHMGNSVVTYNTLIDGLCKAGRLDEAEELLEEMEEKGIKPDVVTYTTLIDGLCKAGKVDEALELFDEMKERGIKPDVVTYTTLIDGLCKAGDVDEALELFKEMRSKGVKPNVVTYNTLIDGLCKAGRLDEAEELLEEMEEKGIKPDVVTYTTLIDGLCKAGKVDEALELFDEMKERGIKPDVVTYTTLIDGLCKAGDVDEALELFKEMRSKGVKPNVVTYNTLIDGLCKAGRLDEAEELLEEMEEKGIKPDVVTYTTLIDGLCKAGKVDEALELFDEMKERGIKPDVVTYTTLIDGLCKAGDVDEALELFKEMRSKGVKPNVVTYNTLIDGLCKAGRLDEAEELLEEMEEKGIKPDVVTYTTLIDGLCKAGKVDEALELFDEMKERGIKPDVVTYTTLIDGLCKAGDVDEALELFKEMRSKGVKPNVVTYNTLIDGLCKAGRLDEAEELLEEMEEKGIKPDVVTYTTLIDGLCKAGKVDEALELFDEMKERGIKPDVVTYTTLIDGLCKAGDVDEALELFKEMRSKGVKPNVVTYNTLIDGLCKAGRLDEAEELLEEMEEKGIKPDVVTYTTLIDGLCKAGKVDEALELFDEMKERGIKPDVVTYTTLIDGLCKAGDVDEALELFKEMRSKGVKPNELTYNTLISGLGKAGRARDPPVLSSGSGGSGGGGHHHHHHGR

SEQ ID NO: 87 - protein, 869 aa, Artificial Sequence
  Synthesized Sequence
MAGVFTLEDFVGDWRQTAGYNLDQVLEQGGVSSLFQNLGVSVTPIQRIVLSGENGLKIDIHVIIPYEGLSGDQMGQIEKIFKVVYPVDDHHFKVILHYGTLVIDGVTPNMIDYFGRPYEGIAVFDGKKITVTGTLWNGNKIIDERLINPDGSLLFRVTINGVTGWRLCERILAGGGGSLVPRGSGGGGSSRLHMGNSVVTYNTLIDGLCKAGRLDEAEELLEEMEEKGIKPDVVTYNTLIDGLCKSGKIEEALKLFKEMEEKGITPSVVTYNTLIDGLCKAGRLDEAEELLEEMEEKGIKPDVVTYNTLIDGLCKAGRLDEAEELLEEMEEKGIKPDVVTYNTLIDGLCKAGRLDEAEELLEEMEEKGIKPDVVTYTTLIDGLCKAGKVDEALELFDEMKERGIKPDVVTYNTLIDGLCKSGKIEEALKLFKEMEEKGITPSVVTYNTLIDGLCKSGKIEEALKLFKEMEEKGITPSVVTYTTLIDGLCKAGDVDEALELFKEMRSKGVKPNVVTYNTLIDGLCKAGRLDEAEELLEEMEEKGIKPDVVTYNTLIDGLCKAGRLDEAEELLEEMEEKGIKPDVVTYNTLIDGLCKAGRLDEAEELLEEMEEKGIKPDVVTYNTLIDGLCKSGKIEEALKLFKEMEEKGITPSVVTYNTLIDGLCKSGKIEEALKLFKEMEEKGITPSVVTYNTLIDGLCKSGKIEEALKLFKEMEEKGITPSVVTYTTLIDGLCKAGDVDEALELFKEMRSKGVKPNVVTYNTLIDGLCKAGRLDEAEELLEEMEEKGIKPDVVTYTTLIDGLCKAGDVDEALELFKEMRSKGVKPNELTYNTLISGLGKAGRARDPPVLSSGSGGSGGGGHHHHHHGR

SEQ ID NO: 88 - protein, 869 aa, Artificial Sequence
  Synthesized Sequence
MAGVFTLEDFVGDWRQTAGYNLDQVLEQGGVSSLFQNLGVSVTPIQRIVLSGENGLKIDIHVIIPYEGLSGDQMGQIEKIFKVVYPVDDHHFKVILHYGTLVIDGVTPNMIDYFGRPYEGIAVFDGKKITVTGTLWNGNKIIDERLINPDGSLLFRVTINGVTGWRLCERILAGGGGSLVPRGSGGGGSSRLHMGNSVVTYNTLIDGLCKSGKIEEALKLFKEMEEKGITPSVVTYNTLIDGLCKSGKIEEALKLFKEMEEKGITPSVVTYNTLIDGLCKSGKIEEALKLFKEMEEKGITPSVVTYTTLIDGLCKAGDVDEALELFKEMRSKGVKPNVVTYNTLIDGLCKAGRLDEAEELLEEMEEKGIKPDVVTYTTLIDGLCKAGDVDEALELFKEMRSKGVKPNVVTYTTLIDGLCKAGKVDEALELFDEMKERGIKPDVVTYTTLIDGLCKAGDVDEALELFKEMRSKGVKPNVVTYNTLIDGLCKAGRLDEAEELLEEMEEKGIKPDVVTYTTLIDGLCKAGKVDEALELFDEMKERGIKPDVVTYNTLIDGLCKAGRLDEAEELLEEMEEKGIKPDVVTYTTLIDGLCKAGKVDEALELFDEMKERGIKPDVVTYTTLIDGLCKAGDVDEALELFKEMRSKGVKPNVVTYNTLIDGLCKSGKIEEALKLFKEMEEKGITPSVVTYTTLIDGLCKAGDVDEALELFKEMRSKGVKPNVVTYTTLIDGLCKAGDVDEALELFKEMRSKGVKPNVVTYTTLIDGLCKAGKVDEALELFDEMKERGIKPDVVTYNTLIDGLCKSGKIEEALKLFKEMEEKGITPSELTYNTLISGLGKAGRARDPPVLSSGSGGSGGGGHHHHHHGR

SEQ ID NO: 89 - protein, 731 aa, Artificial Sequence
  Synthesized Sequence
MAGDEKTTGWRGGHVVEGLAGELEQLRARLEHHPQGQREPGGSGGHMGSGGSRLHMGNSVVTYTTLIDGLCKAGKVDEALELFDEMKERGIKPDVVTYTTLIDGLCKAGDVDEALELFKEMRSKGVKPNVVTYTTLIDGLCKAGDVDEALELFKEMRSKGVKPNVVTYNTLIDGLCKAGRLDEAEELLEEMEEKGIKPDVVTYTTLIDGLCKAGKVDEALELFDEMKERGIKPDVVTYTTLIDGLCKAGDVDEALELFKEMRSKGVKPNVVTYTTLIDGLCKAGDVDEALELFKEMRSKGVKPNVVTYNTLIDGLCKSGKIEEALKLFKEMEEKGITPSVVTYNTLIDGLCKAGRLDEAEELLEEMEEKGIKPDVVTYNTLIDGLCKSGKIEEALKLFKEMEEKGITPSVVTYNTLIDGLCKAGRLDEAEELLEEMEEKGIKPDVVTYNTLIDGLCKAGRLDEAEELLEEMEEKGIKPDVVTYNTLIDGLCKSGKIEEALKLFKEMEEKGITPSVVTYNTLIDGLCKSGKIEEALKLFKEMEEKGITPSVVTYTTLIDGLCKAGKVDEALELFDEMKERGIKPDVVTYTTLIDGLCKAGKVDEALELFDEMKERGIKPDVVTYTTLIDGLCKAGKVDEALELFDEMKERGIKPDVVTYTTLIDGLCKAGDVDEALELFKEMRSKGVKPNELTYNTLISGLGKAGRARDPPVLSSGSGGSGGGGHHHHHHGR

SEQ ID NO: 90 - protein, 731 aa, Artificial Sequence
  Synthesized Sequence
MAGDEKTTGWRGGHVVEGLAGELEQLRARLEHHPQGQREPGGSGGHMGSGGSRLHMGNSVVTYTTLIDGLCKAGKVDEALELFDEMKERGIKPDVVTYTTLIDGLCKAGDVDEALELFKEMRSKGVKPNVVTYTTLIDGLCKAGKVDEALELFDEMKERGIKPDVVTYTTLIDGLCKAGDVDEALELFKEMRSKGVKPNVVTYTTLIDGLCKAGKVDEALELFDEMKERGIKPDVVTYTTLIDGLCKAGKVDEALELFDEMKERGIKPDVVTYTTLIDGLCKAGDVDEALELFKEMRSKGVKPNVVTYTTLIDGLCKAGDVDEALELFKEMRSKGVKPNVVTYTTLIDGLCKAGKVDEALELFDEMKERGIKPDVVTYNTLIDGLCKSGKIEEALKLFKEMEEKGITPSVVTYNTLIDGLCKSGKIEEALKLFKEMEEKGITPSVVTYNTLIDGLCKAGRLDEAEELLEEMEEKGIKPDVVTYTTLIDGLCKAGKVDEALELFDEMKERGIKPDVVTYTTLIDGLCKAGDVDEALELFKEMRSKGVKPNVVTYTTLIDGLCKAGKVDEALELFDEMKERGIKPDVVTYTTLIDGLCKAGDVDEALELFKEMRSKGVKPNVVTYTTLIDGLCKAGKVDEALELFDEMKERGIKPDVVTYNTLIDGLCKAGRLDEAEELLEEMEEKGIKPDELTYNTLISGLGKAGRARDPPVLSSGSGGSGGGGHHHHHHGR

SEQ ID NO: 91 - protein, 731 aa, Artificial Sequence
  Synthesized Sequence
MAGDEKTTGWRGGHVVEGLAGELEQLRARLEHHPQGQREPGGSGGHMGSGGSRLHMGNSVVTYNTLIDGLCKSGKIEEALKLFKEMEEKGITPSVVTYNTLIDGLCKAGRLDEAEELLEEMEEKGIKPDVVTYTTLIDGLCKAGKVDEALELFDEMKERGIKPDVVTYTTLIDGLCKAGDVDEALELFKEMRSKGVKPNVVTYTTLIDGLCKAGKVDEALELFDEMKERGIKPDVVTYNTLIDGLCKAGRLDEAEELLEEMEEKGIKPDVVTYNTLIDGLCKSGKIEEALKLFKEMEEKGITPSVVTYTTLIDGLCKAGDVDEALELFKEMRSKGVKPNVVTYNTLIDGLCKAGRLDEAEELLEEMEEKGIKPDVVTYTTLIDGLCKAGDVDEALELFKEMRSKGVKPNVVTYTTLIDGLCKAGDVDEALELFKEMRSKGVKPNVVTYNTLIDGLCKSGKIEEALKLFKEMEEKGITPSVVTYNTLIDGLCKSGKIEEALKLFKEMEEKGITPSVVTYTTLIDGLCKAGDVDEALELFKEMRSKGVKPNVVTYTTLIDGLCKAGKVDEALELFDEMKERGIKPDVVTYNTLIDGLCKSGKIEEALKLFKEMEEKGITPSVVTYNTLIDGLCKSGKIEEALKLFKEMEEKGITPSVVTYNTLIDGLCKAGRLDEAEELLEEMEEKGIKPDELTYNTLISGLGKAGRARDPPVLSSGSGGSGGGGHHHHHHGR

SEQ ID NO: 92 - protein, 731 aa, Artificial Sequence
  Synthesized Sequence
MAGDEKTTGWRGGHVVEGLAGELEQLRARLEHHPQGQREPGGSGGHMGSGGSRLHMGNSVVTYNTLIDGLCKSGKIEEALKLFKEMEEKGITPSVVTYTTLIDGLCKAGDVDEALELFKEMRSKGVKPNVVTYTTLIDGLCKAGDVDEALELFKEMRSKGVKPNVVTYNTLIDGLCKSGKIEEALKLFKEMEEKGITPSVVTYTTLIDGLCKAGDVDEALELFKEMRSKGVKPNVVTYNTLIDGLCKAGRLDEAEELLEEMEEKGIKPDVVTYNTLIDGLCKSGKIEEALKLFKEMEEKGITPSVVTYTTLIDGLCKAGDVDEALELFKEMRSKGVKPNVVTYTTLIDGLCKAGKVDEALELFDEMKERGIKPDVVTYNTLIDGLCKAGRLDEAEELLEEMEEKGIKPDVVTYNTLIDGLCKSGKIEEALKLFKEMEEKGITPSVVTYNTLIDGLCKAGRLDEAEELLEEMEEKGIKPDVVTYTTLIDGLCKAGKVDEALELFDEMKERGIKPDVVTYTTLIDGLCKAGDVDEALELFKEMRSKGVKPNVVTYNTLIDGLCKAGRLDEAEELLEEMEEKGIKPDVVTYTTLIDGLCKAGDVDEALELFKEMRSKGVKPNVVTYTTLIDGLCKAGDVDEALELFKEMRSKGVKPNVVTYTTLIDGLCKAGKVDEALELFDEMKERGIKPDELTYNTLISGLGKAGRARDPPVLSSGSGGSGGGGHHHHHHGR

SEQ ID NO: 93 - protein, 731 aa, Artificial Sequence
  Synthesized Sequence
MAGDEKTTGWRGGHVVEGLAGELEQLRARLEHHPQGQREPGGSGGHMGSGGSRLHMGNSVVTYNTLIDGLCKSGKIEEALKLFKEMEEKGITPSVVTYTTLIDGLCKAGDVDEALELFKEMRSKGVKPNVVTYNTLIDGLCKSGKIEEALKLFKEMEEKGITPSVVTYNTLIDGLCKAGRLDEAEELLEEMEEKGIKPDVVTYTTLIDGLCKAGDVDEALELFKEMRSKGVKPNVVTYNTLIDGLCKAGRLDEAEELLEEMEEKGIKPDVVTYNTLIDGLCKAGRLDEAEELLEEMEEKGIKPDVVTYNTLIDGLCKAGRLDEAEELLEEMEEKGIKPDVVTYTTLIDGLCKAGDVDEALELFKEMRSKGVKPNVVTYTTLIDGLCKAGDVDEALELFKEMRSKGVKPNVVTYTTLIDGLCKAGKVDEALELFDEMKERGIKPDVVTYNTLIDGLCKAGRLDEAEELLEEMEEKGIKPDVVTYNTLIDGLCKAGRLDEAEELLEEMEEKGIKPDVVTYTTLIDGLCKAGDVDEALELFKEMRSKGVKPNVVTYNTLIDGLCKAGRLDEAEELLEEMEEKGIKPDVVTYNTLIDGLCKSGKIEEALKLFKEMEEKGITPSVVTYTTLIDGLCKAGDVDEALELFKEMRSKGVKPNVVTYTTLIDGLCKAGDVDEALELFKEMRSKGVKPNELTYNTLISGLGKAGRARDPPVLSSGSGGSGGGGHHHHHHGR

SEQ ID NO: 94 - protein, 731 aa, Artificial Sequence
  Synthesized Sequence
MAGDEKTTGWRGGHVVEGLAGELEQLRARLEHHPQGQREPGGSGGHMGSGGSRLHMGNSVVTYTTLIDGLCKAGKVDEALELFDEMKERGIKPDVVTYNTLIDGLCKSGKIEEALKLFKEMEEKGITPSVVTYTTLIDGLCKAGDVDEALELFKEMRSKGVKPNVVTYTTLIDGLCKAGKVDEALELFDEMKERGIKPDVVTYTTLIDGLCKAGDVDEALELFKEMRSKGVKPNVVTYNTLIDGLCKAGRLDEAEELLEEMEEKGIKPDVVTYTTLIDGLCKAGDVDEALELFKEMRSKGVKPNVVTYTTLIDGLCKAGDVDEALELFKEMRSKGVKPNVVTYNTLIDGLCKAGRLDEAEELLEEMEEKGIKPDVVTYNTLIDGLCKAGRLDEAEELLEEMEEKGIKPDVVTYTTLIDGLCKAGDVDEALELFKEMRSKGVKPNVVTYTTLIDGLCKAGDVDEALELFKEMRSKGVKPNVVTYNTLIDGLCKAGRLDEAEELLEEMEEKGIKPDVVTYTTLIDGLCKAGDVDEALELFKEMRSKGVKPNVVTYTTLIDGLCKAGDVDEALELFKEMRSKGVKPNVVTYTTLIDGLCKAGKVDEALELFDEMKERGIKPDVVTYTTLIDGLCKAGDVDEALELFKEMRSKGVKPNVVTYTTLIDGLCKAGDVDEALELFKEMRSKGVKPNELTYNTLISGLGKAGRARDPPVLSSGSGGSGGGGHHHHHHGR

SEQ ID NO: 95 - protein, 731 aa, Artificial Sequence
  Synthesized Sequence
MAGDEKTTGWRGGHVVEGLAGELEQLRARLEHHPQGQREPGGSGGHMGSGGSRLHMGNSVVTYTTLIDGLCKAGDVDEALELFKEMRSKGVKPNVVTYTTLIDGLCKAGDVDEALELFKEMRSKGVKPNVVTYTTLIDGLCKAGKVDEALELFDEMKERGIKPDVVTYTTLIDGLCKAGKVDEALELFDEMKERGIKPDVVTYTTLIDGLCKAGDVDEALELFKEMRSKGVKPNVVTYNTLIDGLCKAGRLDEAEELLEEMEEKGIKPDVVTYTTLIDGLCKAGDVDEALELFKEMRSKGVKPNVVTYTTLIDGLCKAGDVDEALELFKEMRSKGVKPNVVTYNTLIDGLCKAGRLDEAEELLEEMEEKGIKPDVVTYTTLIDGLCKAGDVDEALELFKEMRSKGVKPNVVTYNTLIDGLCKAGRLDEAEELLEEMEEKGIKPDVVTYNTLIDGLCKSGKIEEALKLFKEMEEKGITPSVVTYTTLIDGLCKAGDVDEALELFKEMRSKGVKPNVVTYTTLIDGLCKAGDVDEALELFKEMRSKGVKPNVVTYTTLIDGLCKAGDVDEALELFKEMRSKGVKPNVVTYNTLIDGLCKSGKIEEALKLFKEMEEKGITPSVVTYTTLIDGLCKAGDVDEALELFKEMRSKGVKPNVVTYNTLIDGLCKSGKIEEALKLFKEMEEKGITPSELTYNTLISGLGKAGRARDPPVLSSGSGGSGGGGHHHHHHGR

SEQ ID NO: 96 - protein, 731 aa, Artificial Sequence
  Synthesized Sequence
MAGDEKTTGWRGGHVVEGLAGELEQLRARLEHHPQGQREPGGSGGHMGSGGSRLHMGNSVVTYTTLIDGLCKAGKVDEALELFDEMKERGIKPDVVTYNTLIDGLCKAGRLDEAEELLEEMEEKGIKPDVVTYTTLIDGLCKAGKVDEALELFDEMKERGIKPDVVTYTTLIDGLCKAGDVDEALELFKEMRSKGVKPNVVTYNTLIDGLCKAGRLDEAEELLEEMEEKGIKPDVVTYTTLIDGLCKAGKVDEALELFDEMKERGIKPDVVTYNTLIDGLCKAGRLDEAEELLEEMEEKGIKPDVVTYTTLIDGLCKAGKVDEALELFDEMKERGIKPDVVTYTTLIDGLCKAGKVDEALELFDEMKERGIKPDVVTYTTLIDGLCKAGDVDEALELFKEMRSKGVKPNVVTYTTLIDGLCKAGKVDEALELFDEMKERGIKPDVVTYNTLIDGLCKAGRLDEAEELLEEMEEKGIKPDVVTYNTLIDGLCKAGRLDEAEELLEEMEEKGIKPDVVTYTTLIDGLCKAGDVDEALELFKEMRSKGVKPNVVTYTTLIDGLCKAGDVDEALELFKEMRSKGVKPNVVTYTTLIDGLCKAGKVDEALELFDEMKERGIKPDVVTYTTLIDGLCKAGKVDEALELFDEMKERGIKPDVVTYNTLIDGLCKSGKIEEALKLFKEMEEKGITPSELTYNTLISGLGKAGRARDPPVLSSGSGGSGGGGHHHHHHGR

SEQ ID NO: 97 - protein, 731 aa, Artificial Sequence
  Synthesized Sequence
MAGDEKTTGWRGGHVVEGLAGELEQLRARLEHHPQGQREPGGSGGHMGSGGSRLHMGNSVVTYNTLIDGLCKSGKIEEALKLFKEMEEKGITPSVVTYNTLIDGLCKSGKIEEALKLFKEMEEKGITPSVVTYNTLIDGLCKSGKIEEALKLFKEMEEKGITPSVVTYTTLIDGLCKAGDVDEALELFKEMRSKGVKPNVVTYNTLIDGLCKAGRLDEAEELLEEMEEKGIKPDVVTYTTLIDGLCKAGDVDEALELFKEMRSKGVKPNVVTYTTLIDGLCKAGKVDEALELFDEMKERGIKPDVVTYTTLIDGLCKAGDVDEALELFKEMRSKGVKPNVVTYNTLIDGLCKAGRLDEAEELLEEMEEKGIKPDVVTYTTLIDGLCKAGKVDEALELFDEMKERGIKPDVVTYNTLIDGLCKAGRLDEAEELLEEMEEKGIKPDVVTYTTLIDGLCKAGKVDEALELFDEMKERGIKPDVVTYTTLIDGLCKAGDVDEALELFKEMRSKGVKPNVVTYNTLIDGLCKSGKIEEALKLFKEMEEKGITPSVVTYTTLIDGLCKAGDVDEALELFKEMRSKGVKPNVVTYTTLIDGLCKAGDVDEALELFKEMRSKGVKPNVVTYTTLIDGLCKAGKVDEALELFDEMKERGIKPDVVTYNTLIDGLCKSGKIEEALKLFKEMEEKGITPSELTYNTLISGLGKAGRARDPPVLSSGSGGSGGGGHHHHHHGR

SEQ ID NO: 98 - DNA, 30 bp, Artificial Sequence
  Synthesized Sequence
gacaugccaacaucagucugauaaggacug

SEQ ID NO: 99 - DNA, 30 bp, Artificial Sequence
  Synthesized Sequence
gacaugccacaauguggccgaggacgacug

SEQ ID NO: 100 - DNA, 30 bp, Artificial Sequence
  Synthesized Sequence
gacaugcaagccaguuuucauuuuggacug

SEQ ID NO: 101 - DNA, 30 bp, Artificial Sequence
  Synthesized Sequence
gacaugccacuauuuaaguuaucaagacug

SEQ ID NO: 102 - DNA, 30 bp, Artificial Sequence
  Synthesized Sequence
gacaugccaaacuuucacuuugaaagacug

SEQ ID NO: 103 - DNA, 30 bp, Artificial Sequence
  Synthesized Sequence
gacaugcgguggugaggcccugggcgacug

SEQ ID NO: 104 - DNA, 30 bp, Artificial Sequence
  Synthesized Sequence
gacaugcgacucaggaaucggcucugacug

SEQ ID NO: 105 - DNA, 30 bp, Artificial Sequence
  Synthesized Sequence
gacaugccaacaucaaagacaccaugacug

SEQ ID NO: 106 - DNA, 30 bp, Artificial Sequence
  Synthesized Sequence
gacaugcgucagaggguucuggauugacug

SEQ ID NO: 107 - DNA, 30 bp, Artificial Sequence
  Synthesized Sequence
gacaugcgcagauaauuaauaagaagacug

SEQ ID NO: 108 - DNA, 30 bp, Artificial Sequence
  Synthesized Sequence
gacaugcaaggauaauaucaaacacgacug

SEQ ID NO: 109 - DNA, 30 bp, Artificial Sequence
  Synthesized Sequence
gacaugcuuaucagacugauguugagacug

SEQ ID NO: 110 - DNA, 30 bp, Artificial Sequence
  Synthesized Sequence
gacaugcgguuagagauacaguguggacug

SEQ ID NO: 111 - DNA, 30 bp, Artificial Sequence
  Synthesized Sequence
gacaugcgugggggugguaggaaaugacug

SEQ ID NO: 112 - DNA, 30 bp, Artificial Sequence
  Synthesized Sequence
gacaugcgugauguggaguuaaggcgacug

SEQ ID NO: 113 - DNA, 30 bp, Artificial Sequence
  Synthesized Sequence
gacaugcggaagagugucuggagcagacug

SEQ ID NO: 114 - DNA, 30 bp, Artificial Sequence
  Synthesized Sequence
gacaugcugaugaugaugaugaugagacug

SEQ ID NO: 115 - DNA, 30 bp, Artificial Sequence
  Synthesized Sequence
gacaugcucuuugccauuucccauagacug

SEQ ID NO: 116 - DNA, 30 bp, Artificial Sequence
  Synthesized Sequence
gacaugccccauagaugugacaagcgacug

SEQ ID NO: 117 - DNA, 18 bp, Artificial Sequence
  Synthesized Sequence
gugaaggugacagcaguc

SEQ ID NO: 118 - DNA, 18 bp, Artificial Sequence
  Synthesized Sequence
cgggccuccgguguucug

SEQ ID NO: 119 - DNA, 18 bp, Artificial Sequence
  Synthesized Sequence
cuuaucagacugauguug

SEQ ID NO: 120 - DNA, 18 bp, Artificial Sequence
  Synthesized Sequence
acguggaugaaguuggug

SEQ ID NO: 121 - DNA, 18 bp, Artificial Sequence
  Synthesized Sequence
agcuuaucagacugaugu

SEQ ID NO: 122 - DNA, 18 bp, Artificial Sequence
  Synthesized Sequence
gcuuaucagacugauguu

SEQ ID NO: 123 - DNA, 18 bp, Artificial Sequence
  Synthesized Sequence
cauguucgaauucguuuu

SEQ ID NO: 124 - DNA, 18 bp, Artificial Sequence
  Synthesized Sequence
ugcugggcaaggugaacg

SEQ ID NO: 125 - DNA, 18 bp, Artificial Sequence
  Synthesized Sequence
uagcuuaucagacugaug

SEQ ID NO: 126 - DNA, 18 bp, Artificial Sequence
  Synthesized Sequence
uuuuauugugcuauggca

SEQ ID NO: 127 - DNA, 18 bp, Artificial Sequence
  Synthesized Sequence
uccucaccggugacuggu

SEQ ID NO: 128 - DNA, 18 bp, Artificial Sequence
  Synthesized Sequence
uguuuugguuaauaaaac

SEQ ID NO: 129 - DNA, 18 bp, Artificial Sequence
  Synthesized Sequence
ccuguuaugugugugauu

SEQ ID NO: 130 - DNA, 18 bp, Artificial Sequence
  Synthesized Sequence
cugagaguuggcaugaau

SEQ ID NO: 131 - DNA, 18 bp, Artificial Sequence
  Synthesized Sequence
caaccaugcaucuuggaa

SEQ ID NO: 132 - DNA, 18 bp, Artificial Sequence
  Synthesized Sequence
gugcugauuccuagacuu

SEQ ID NO: 133 - DNA, 18 bp, Artificial Sequence
  Synthesized Sequence
cgcugagcugcugccugg

SEQ ID NO: 134 - DNA, 18 bp, Artificial Sequence
  Synthesized Sequence
ugugcuauggcaaaucug

SEQ ID NO: 135 - DNA, 18 bp, Artificial Sequence
  Synthesized Sequence
uuguuugcuuugcuaaag

SEQ ID NO: 136 - DNA, 18 bp, Artificial Sequence
  Synthesized Sequence
acgucccgggaggcggca

SEQ ID NO: 137 - DNA, 18 bp, Artificial Sequence
  Synthesized Sequence
ggcggggcacugugcgug

SEQ ID NO: 138 - DNA, 18 bp, Artificial Sequence
  Synthesized Sequence
cguguggaucggcggcuc

SEQ ID NO: 139 - DNA, 18 bp, Artificial Sequence
  Synthesized Sequence
uccaggcugugcuauccc

SEQ ID NO: 140 - DNA, 18 bp, Artificial Sequence
  Synthesized Sequence
ucaggauuuaaaaacugg

SEQ ID NO: 141 - DNA, 18 bp, Artificial Sequence
  Synthesized Sequence
ucuagaauccuaaaggca

SEQ ID NO: 142 - DNA, 18 bp, Artificial Sequence
  Synthesized Sequence
uuguggccuuuuucuccu

SEQ ID NO: 143 - DNA, 18 bp, Artificial Sequence
  Synthesized Sequence
ugguguaucuugucuuua

SEQ ID NO: 144 - DNA, 18 bp, Artificial Sequence
  Synthesized Sequence
gauaucgccgcgcucguc

SEQ ID NO: 145 - DNA, 18 bp, Artificial Sequence
  Synthesized Sequence
cggcggcggcggcggcgg

SEQ ID NO: 146 - DNA, 18 bp, Artificial Sequence
  Synthesized Sequence
acaacggcuccggcaugu

SEQ ID NO: 147 - DNA, 18 bp, Artificial Sequence
  Synthesized Sequence
ggcggcggcggcggcggc

SEQ ID NO: 148 - DNA, 18 bp, Artificial Sequence
  Synthesized Sequence
agccauacuauuuaugug

SEQ ID NO: 149 - DNA, 18 bp, Artificial Sequence
  Synthesized Sequence
ugaaagcgaaaguaaagc

SEQ ID NO: 150 - DNA, 18 bp, Artificial Sequence
  Synthesized Sequence
gcggcggcggcggcggcg

SEQ ID NO: 151 - DNA, 18 bp, Artificial Sequence
  Synthesized Sequence
cuggaucuuagcaacguc

SEQ ID NO: 152 - DNA, 18 bp, Artificial Sequence
  Synthesized Sequence
gucuauuuucccacccuu

SEQ ID NO: 153 - DNA, 18 bp, Artificial Sequence
  Synthesized Sequence
uugguaucaagguuacaa

SEQ ID NO: 154 - DNA, 18 bp, Artificial Sequence
  Synthesized Sequence
gcucguggagaccaucuu

SEQ ID NO: 155 - DNA, 18 bp, Artificial Sequence
  Synthesized Sequence
ggagcgagcaucccccaa

SEQ ID NO: 156 - DNA, 18 bp, Artificial Sequence
  Synthesized Sequence
cuuuuuucuggcuaccaa

SEQ ID NO: 157 - DNA, 18 bp, Artificial Sequence
  Synthesized Sequence
cuccuccugagcgcaagu

SEQ ID NO: 158 - DNA, 18 bp, Artificial Sequence
  Synthesized Sequence
cgccucuggccguaccac

SEQ ID NO: 159 - DNA, 18 bp, Artificial Sequence
  Synthesized Sequence
gcagcagcagcagcagca

SEQ ID NO: 160 - DNA, 18 bp, Artificial Sequence
  Synthesized Sequence
gcgccuauagcacucgaa

SEQ ID NO: 161 - DNA, 18 bp, Artificial Sequence
  Synthesized Sequence
uucacacucgaagauuuc

SEQ ID NO: 162 - DNA, 18 bp, Artificial Sequence
  Synthesized Sequence
agcagcagcagcagcagc

SEQ ID NO: 163 - DNA, 18 bp, Artificial Sequence
  Synthesized Sequence
gggguaaacuggggucgc

SEQ ID NO: 164 - DNA, 18 bp, Artificial Sequence
  Synthesized Sequence
uuuguuucagaaucucgg

SEQ ID NO: 165 - DNA, 18 bp, Artificial Sequence
  Synthesized Sequence
ggcaaaaagaucacucac

SEQ ID NO: 166 - DNA, 18 bp, Artificial Sequence
  Synthesized Sequence
cgauggcucuucuccacu

SEQ ID NO: 167 - DNA, 18 bp, Artificial Sequence
  Synthesized Sequence
ccaguccaaguguggcuc

SEQ ID NO: 168 - DNA, 18 bp, Artificial Sequence
  Synthesized Sequence
cagcagcagcagcagcag

SEQ ID NO: 169 - DNA, 2610 bp, Artificial Sequence
  Synthesized Sequence
atggccggagtgttcacactggaggacttcgtgggcgactggagacagaccgccggctacaacctggaccaggtgctggagcagggcggagtgagcagcctgtttcagaacctgggcgtgagcgtcacccccatccagaggatcgtgctgtccggcgagaatggcctgaagatcgacatccacgtcatcatcccctacgagggcctgagcggcgatcagatgggccagatcgagaagatcttcaaggtggtgtatcccgtcgacgaccaccacttcaaggtgatcctgcattacggcaccctcgtgatcgacggcgtgacccctaacatgatcgactacttcggcaggccctacgagggaatcgccgtgttcgacggaaagaagatcaccgtgaccggcaccctgtggaacggaaacaagatcatcgacgagaggctgatcaaccccgacggctccctgctgttcagggtgaccatcaatggcgtgaccggctggagactgtgcgagagaatcctggccggaggcggaggaagcctcgtgcccagaggatccggcggaggcggctccagccggctccatatgggaaactccgtggtcacatacaccaccctgatcgacggcctgtgcaaggccggcaaggtggacgaagccctggagctgttcgacgagatgaaggagaggggcatcaagcccgacgtggtcacatacaacaccctgatcgacggcctgtgcaaggccggcagactggatgaggccgaggagctgctggaggagatggaggagaagggcatcaagcccgacgtggtcacatacaccaccctgatcgacggcctgtgcaaggccggcaaagtggacgaggccctggagctgttcgacgagatgaaggagaggggcatcaagcccgacgtggtcacatacaccacactgatcgacggactgtgtaaagccggcgacgtggacgaagccctcgagctgttcaaagagatgcggagcaagggcgtgaagcccaacgtggtcacatacaccacactgatcgacggactgtgtaaagccggcgacgtggacgaagccctcgagctgttcaaagagatgcggagcaagggcgtgaagcccaacgtggtcacatacaccaccctgatcgacggcctgtgcaaggccggcaaggtggatgaggccctggagctgttcgacgagatgaaggagaggggcatcaagcccgacgtggtcacatacaccaccctgatcgacggcctgtgcaaggccggcaaagtggacgaggccctggagctgttcgacgagatgaaggagaggggcatcaagcccgacgtggtcacatacaacaccctgatcgacggcctgtgcaaggccggcagactggacgaggccgaagagctgctggaggagatggaggagaagggcatcaagcccgacgtggtcacatacaccaccctgatcgacggcctgtgcaaggccggcaaggtggacgaagccctggagctgttcgacgagatgaaggagaggggcatcaagcccgacgtggtcacatacaccacactgatcgacggactgtgtaaagccggcgacgtggacgaagccctcgagctgttcaaagagatgcggagcaagggcgtgaagcccaacgtggtcacatacaacaccctgatcgacggcctgtgcaagagcggcaagatcgaggaggccctgaagctgttcaaggagatggaggagaagggcatcacccccagcgtggtcacatacaccacactgatcgacggactgtgtaaagccggcgacgtggacgaagccctcgagctgttcaaagagatgcggagcaagggcgtgaagcccaacgtggtcacatacaccaccctgatcgacggcctgtgcaaggccggcaaggtggacgaagccctggagctgttcgacgagatgaaggagaggggcatcaagcccgacgtggtcacatacaacaccctgatcgacggcctgtgcaagagcggcaagatcgaggaggccctgaagctgttcaaggagatggaggagaagggcatcacccccagcgtggtcacatacaccacactgatcgacggactgtgtaaagccggcgacgtggacgaagccctcgagctgttcaaagagatgcggagcaagggcgtgaagcccaacgtggtcacatacaccaccctgatcgacggcctgtgcaaggccggcaaggtggacgaagccctggagctgttcgacgagatgaaggagaggggcatcaagcccgacgtggtcacatacaacaccctgatcgacggcctgtgcaaggccggcagactggacgaagccgaggagctgctggaggagatggaggagaagggcatcaagcccgacgtggtcacatacaacaccctgatcgacggcctgtgcaagagcggcaagatcgaggaggccctgaagctgttcaaggagatggaggagaagggcatcacccccagcgagctgacctacaacaccctgatcagcggcctgggcaaggccggcagagccagagacccccccgtgctcagtagcggctccggcggcagcgggggaggcgggcatcatcaccatcaccacggacgctag

SEQ ID NO: 170 - DNA, 2610 bp, Artificial Sequence
  Synthesized Sequence
atggccggagtgttcacactggaggacttcgtgggcgactggagacagaccgccggctacaacctggaccaggtgctggagcagggcggagtgagcagcctgtttcagaacctgggcgtgagcgtcacccccatccagaggatcgtgctgtccggcgagaatggcctgaagatcgacatccacgtcatcatcccctacgagggcctgagcggcgatcagatgggccagatcgagaagatcttcaaggtggtgtatcccgtcgacgaccaccacttcaaggtgatcctgcattacggcaccctcgtgatcgacggcgtgacccctaacatgatcgactacttcggcaggccctacgagggaatcgccgtgttcgacggaaagaagatcaccgtgaccggcaccctgtggaacggaaacaagatcatcgacgagaggctgatcaaccccgacggctccctgctgttcagggtgaccatcaatggcgtgaccggctggagactgtgcgagagaatcctggccggaggcggaggaagcctcgtgcccagaggatccggcggaggcggctccagccggctccatatgggaaactccgtggtcacatacaacaccctgatcgacggcctgtgcaagagcggcaagatcgaggaggccctgaagctgttcaaggagatggaggagaagggcatcacccccagcgtggtcacatacaccaccctgatcgacggcctgtgcaaggccggcaaggtggatgaggccctggagctgttcgacgagatgaaggagaggggcatcaagcccgacgtggtcacatacaccaccctgatcgacggcctgtgcaaggccggcaaagtggacgaggccctggagctgttcgacgagatgaaggagaggggcatcaagcccgacgtggtcacatacaccaccctgatcgacggcctgtgcaaggccggcaaggtggacgaagccctggagctgttcgacgagatgaaggagaggggcatcaagcccgacgtggtcacatacaacaccctgatcgacggcctgtgcaagagcggcaagatcgaggaggccctgaagctgttcaaggagatggaggagaagggcatcacccccagcgtggtcacatacaacaccctgatcgacggcctgtgcaagagcggcaagatcgaggaggccctgaagctgttcaaggagatggaggagaagggcatcacccccagcgtggtcacatacaacaccctgatcgacggcctgtgcaaggccggcagactggatgaggccgaggagctgctggaggagatggaggagaagggcatcaagcccgacgtggtcacatacaacaccctgatcgacggcctgtgcaagagcggcaagatcgaggaggccctgaagctgttcaaggagatggaggagaagggcatcacccccagcgtggtcacatacaacaccctgatcgacggcctgtgcaagagcggcaagatcgaggaggccctgaagctgttcaaggagatggaggagaagggcatcacccccagcgtggtcacatacaccaccctgatcgacggcctgtgcaaggccggcaaggtggatgaggccctggagctgttcgacgagatgaaggagaggggcatcaagcccgacgtggtcacatacaccaccctgatcgacggcctgtgcaaggccggcaaagtggacgaggccctggagctgttcgacgagatgaaggagaggggcatcaagcccgacgtggtcacatacaacaccctgatcgacggcctgtgcaaggccggcagactggacgaggccgaagagctgctggaggagatggaggagaagggcatcaagcccgacgtggtcacatacaccaccctgatcgacggcctgtgcaaggccggcaaggtggacgaagccctggagctgttcgacgagatgaaggagaggggcatcaagcccgacgtggtcacatacaacaccctgatcgacggcctgtgcaaggccggcagactggatgaggccgaggagctgctggaggagatggaggagaagggcatcaagcccgacgtggtcacatacaacaccctgatcgacggcctgtgcaaggccggcagactggatgaggccgaggagctgctggaggagatggaggagaagggcatcaagcccgacgtggtcacatacaacaccctgatcgacggcctgtgcaagagcggcaagatcgaggaggccctgaagctgttcaaggagatggaggagaagggcatcacccccagcgtggtcacatacaacaccctgatcgacggcctgtgcaaggccggcagactggacgaagccgaggagctgctggaggagatggaggagaagggcatcaagcccgacgtggtcacatacaccaccctgatcgacggcctgtgcaaggccggcaaggtggatgaggccctggagctgttcgacgagatgaaggagaggggcatcaagcccgacgagctgacctacaacaccctgatcagcggcctgggcaaggccggcagagccagagacccccccgtgctcagtagcggctccggcggcagcgggggaggcgggcatcatcaccatcaccacggacgctag

SEQ ID NO: 171 - DNA, 2610 bp, Artificial Sequence
  Synthesized Sequence
atggccggagtgttcacactggaggacttcgtgggcgactggagacagaccgccggctacaacctggaccaggtgctggagcagggcggagtgagcagcctgtttcagaacctgggcgtgagcgtcacccccatccagaggatcgtgctgtccggcgagaatggcctgaagatcgacatccacgtcatcatcccctacgagggcctgagcggcgatcagatgggccagatcgagaagatcttcaaggtggtgtatcccgtcgacgaccaccacttcaaggtgatcctgcattacggcaccctcgtgatcgacggcgtgacccctaacatgatcgactacttcggcaggccctacgagggaatcgccgtgttcgacggaaagaagatcaccgtgaccggcaccctgtggaacggaaacaagatcatcgacgagaggctgatcaaccccgacggctccctgctgttcagggtgaccatcaatggcgtgaccggctggagactgtgcgagagaatcctggccggaggcggaggaagcctcgtgcccagaggatccggcggaggcggctccagccggctccatatgggaaactccgtggtcacatacaacaccctgatcgacggcctgtgcaagagcggcaagatcgaggaggccctgaagctgttcaaggagatggaggagaagggcatcacccccagcgtggtcacatacaacaccctgatcgacggcctgtgcaaggccggcagactggatgaggccgaggagctgctggaggagatggaggagaagggcatcaagcccgacgtggtgacatacaacaccctgatcgacggcctgtgcaaggccggcagactggatgaggccgaggagctgctggaggagatggaggagaagggcatcaagcccgacgtggtcacatacaccacactgatcgacggactgtgtaaagccggcgacgtggacgaagccctcgagctgttcaaagagatgcggagcaagggcgtgaagcccaacgtggttacatacaacaccctgatcgacggcctgtgcaaggccggcagactggatgaggccgaggagctgctggaggagatggaggagaagggcatcaagcccgacgtggtcacatacaacaccctgatcgacggcctgtgcaagagcggcaagatcgaggaggccctgaagctgttcaaggagatggaggagaagggcatcacccccagcgtggttacatacaccacactgatcgacggactgtgtaaagccggcgacgtggacgaagccctcgagctgttcaaagagatgcggagcaagggcgtgaagcccaacgtggtcacatacaccaccctgatcgacggcctgtgcaaggccggcaaggtggatgaggccctggagctgttcgacgagatgaaggagaggggcatcaagcccgacgtggtgacatacaccacactgatcgacggactgtgtaaagccggcgacgtggacgaagccctcgagctgttcaaagagatgcggagcaagggcgtgaagcccaacgtggtcacatacaacaccctgatcgacggcctgtgcaagagcggcaagatcgaggaggccctgaagctgttcaaggagatggaggagaagggcatcacccccagcgtggttacatacaacaccctgatcgacggcctgtgcaaggccggcagactggatgaggccgaggagctgctggaggagatggaggagaagggcatcaagcccgacgtggtcacatacaccaccctgatcgacggcctgtgcaaggccggcaaggtggatgaggccctggagctgttcgacgagatgaaggagaggggcatcaagcccgacgtggtcacatacaccacactgatcgacggactgtgtaaagccggcgacgtggacgaagccctcgagctgttcaaagagatgcggagcaagggcgtgaagcccaacgtggtcacatacaacaccctgatcgacggcctgtgcaaggccggcagactggatgaggccgaggagctgctggaggagatggaggagaagggcatcaagcccgacgtggttacatacaccaccctgatcgacggcctgtgcaaggccggcaaagtggacgaggccctggagctgttcgacgagatgaaggagaggggcatcaagcccgacgtggtcacatacaacaccctgatcgacggcctgtgcaaggccggcagactggatgaggccgaggagctgctggaggagatggaggagaagggcatcaagcccgacgtggtgacatacaacaccctgatcgacggcctgtgcaaggccggcagactggatgaggccgaggagctgctggaggagatggaggagaagggcatcaagcccgacgtggtcacatacaccaccctgatcgacggcctgtgcaaggccggcaaggtggatgaggccctggagctgttcgacgagatgaaggagaggggcatcaagcccgacgagctgacctacaacaccctgatcagcggcctgggcaaggccggcagagccagagacccccccgtgctcagtagcggctccggcggcagcgggggaggcgggcatcatcaccatcaccacggacgctag

SEQ ID NO: 172 - DNA, 2610 bp, Artificial Sequence
  Synthesized Sequence
atggccggagtgttcacactggaggacttcgtgggcgactggagacagaccgccggctacaacctggaccaggtgctggagcagggcggagtgagcagcctgtttcagaacctgggcgtgagcgtcacccccatccagaggatcgtgctgtccggcgagaatggcctgaagatcgacatccacgtcatcatcccctacgagggcctgagcggcgatcagatgggccagatcgagaagatcttcaaggtggtgtatcccgtcgacgaccaccacttcaaggtgatcctgcattacggcaccctcgtgatcgacggcgtgacccctaacatgatcgactacttcggcaggccctacgagggaatcgccgtgttcgacggaaagaagatcaccgtgaccggcaccctgtggaacggaaacaagatcatcgacgagaggctgatcaaccccgacggctccctgctgttcagggtgaccatcaatggcgtgaccggctggagactgtgcgagagaatcctggccggaggcggaggaagcctcgtgcccagaggatccggcggaggcggctccagccggctccatatgggaaactccgtggtcacatacaccacactgatcgacggactgtgtaaagccggcgacgtggacgaagccctcgagctgttcaaagagatgcggagcaagggcgtgaagcccaacgtggtcacatacaacaccctgatcgacggcctgtgcaagagcggcaagatcgaggaggccctgaagctgttcaaggagatggaggagaagggcatcacccccagcgtggtgacatacaccaccctgatcgacggcctgtgcaaggccggcaaagtggacgaggccctggagctgttcgacgagatgaaggagaggggcatcaagcccgacgtggtcacatacaacaccctgatcgacggcctgtgcaaggccggcagactggatgaggccgaggagctgctggaggagatggaggagaagggcatcaagcccgacgtggttacatacaccaccctgatcgacggcctgtgcaaggccggcaaagtggacgaggccctggagctgttcgacgagatgaaggagaggggcatcaagcccgacgtggtcacatacaccaccctgatcgacggcctgtgcaaggccggcaaggtggatgaggccctggagctgttcgacgagatgaaggagaggggcatcaagcccgacgtggttacatacaccacactgatcgacggactgtgtaaagccggcgacgtggacgaagccctcgagctgttcaaagagatgcggagcaagggcgtgaagcccaacgtggtcacatacaacaccctgatcgacggcctgtgcaaggccggcagactggatgaggccgaggagctgctggaggagatggaggagaagggcatcaagcccgacgtggtgacatacaccaccctgatcgacggcctgtgcaaggccggcaaagtggacgaggccctggagctgttcgacgagatgaaggagaggggcatcaagcccgacgtggtcacatacaccacactgatcgacggactgtgtaaagccggcgacgtggacgaagccctcgagctgttcaaagagatgcggagcaagggcgtgaagcccaacgtggttacatacaccacactgatcgacggactgtgtaaagccggcgacgtggacgaagccctcgagctgttcaaagagatgcggagcaagggcgtgaagcccaacgtggtcacatacaccaccctgatcgacggcctgtgcaaggccggcaaggtggatgaggccctggagctgttcgacgagatgaaggagaggggcatcaagcccgacgtggtcacatacaacaccctgatcgacggcctgtgcaaggccggcagactggatgaggccgaggagctgctggaggagatggaggagaagggcatcaagcccgacgtggtcacatacaacaccctgatcgacggcctgtgcaaggccggcagactggatgaggccgaggagctgctggaggagatggaggagaagggcatcaagcccgacgtggttacatacaccaccctgatcgacggcctgtgcaaggccggcaaagtggacgaggccctggagctgttcgacgagatgaaggagaggggcatcaagcccgacgtggtcacatacaccaccctgatcgacggcctgtgcaaggccggcaaggtggatgaggccctggagctgttcgacgagatgaaggagaggggcatcaagcccgacgtggtgacatacaacaccctgatcgacggcctgtgcaaggccggcagactggatgaggccgaggagctgctggaggagatggaggagaagggcatcaagcccgacgtggtcacatacaccaccctgatcgacggcctgtgcaaggccggcaaggtggatgaggccctggagctgttcgacgagatgaaggagaggggcatcaagcccgacgagctgacctacaacaccctgatcagcggcctgggcaaggccggcagagccagagacccccccgtgctcagtagcggctccggcggcagcgggggaggcgggcatcatcaccatcaccacggacgctag

SEQ ID NO: 173 - DNA, 2610 bp, Artificial Sequence
  Synthesized Sequence
atggccggagtgttcacactggaggacttcgtgggcgactggagacagaccgccggctacaacctggaccaggtgctggagcagggcggagtgagcagcctgtttcagaacctgggcgtgagcgtcacccccatccagaggatcgtgctgtccggcgagaatggcctgaagatcgacatccacgtcatcatcccctacgagggcctgagcggcgatcagatgggccagatcgagaagatcttcaaggtggtgtatcccgtcgacgaccaccacttcaaggtgatcctgcattacggcaccctcgtgatcgacggcgtgacccctaacatgatcgactacttcggcaggccctacgagggaatcgccgtgttcgacggaaagaagatcaccgtgaccggcaccctgtggaacggaaacaagatcatcgacgagaggctgatcaaccccgacggctccctgctgttcagggtgaccatcaatggcgtgaccggctggagactgtgcgagagaatcctggccggaggcggaggaagcctcgtgcccagaggatccggcggaggcggctccagccggctccatatgggaaactccgtggtcacatacaccacactgatcgacggactgtgtaaagccggcgacgtggacgaagccctcgagctgttcaaagagatgcggagcaagggcgtgaagcccaacgtggtcacatacaccaccctgatcgacggcctgtgcaaggccggcaaggtggatgaggccctggagctgttcgacgagatgaaggagaggggcatcaagcccgacgtggtgacatacaacaccctgatcgacggcctgtgcaagagcggcaagatcgaggaggccctgaagctgttcaaggagatggaggagaagggcatcacccccagcgtggtcacatacaacaccctgatcgacggcctgtgcaaggccggcagactggatgaggccgaggagctgctggaggagatggaggagaagggcatcaagcccgacgtggttacatacaacaccctgatcgacggcctgtgcaaggccggcagactggatgaggccgaggagctgctggaggagatggaggagaagggcatcaagcccgacgtggtcacatacaccacactgatcgacggactgtgtaaagccggcgacgtggacgaagccctcgagctgttcaaagagatgcggagcaagggcgtgaagcccaacgtggttacatacaacaccctgatcgacggcctgtgcaaggccggcagactggatgaggccgaggagctgctggaggagatggaggagaagggcatcaagcccgacgtggtcacatacaacaccctgatcgacggcctgtgcaagagcggcaagatcgaggaggccctgaagctgttcaaggagatggaggagaagggcatcacccccagcgtggtgacatacaccacactgatcgacggactgtgtaaagccggcgacgtggacgaagccctcgagctgttcaaagagatgcggagcaagggcgtgaagcccaacgtggtcacatacaccaccctgatcgacggcctgtgcaaggccggcaaggtggatgaggccctggagctgttcgacgagatgaaggagaggggcatcaagcccgacgtggttacatacaccacactgatcgacggactgtgtaaagccggcgacgtggacgaagccctcgagctgttcaaagagatgcggagcaagggcgtgaagcccaacgtggtcacatacaacaccctgatcgacggcctgtgcaagagcggcaagatcgaggaggccctgaagctgttcaaggagatggaggagaagggcatcacccccagcgtggtcacatacaacaccctgatcgacggcctgtgcaaggccggcagactggatgaggccgaggagctgctggaggagatggaggagaagggcatcaagcccgacgtggtcacatacaccaccctgatcgacggcctgtgcaaggccggcaaggtggatgaggccctggagctgttcgacgagatgaaggagaggggcatcaagcccgacgtggttacatacaccacactgatcgacggactgtgtaaagccggcgacgtggacgaagccctcgagctgttcaaagagatgcggagcaagggcgtgaagcccaacgtggtcacatacaacaccctgatcgacggcctgtgcaaggccggcagactggatgaggccgaggagctgctggaggagatggaggagaagggcatcaagcccgacgtggtgacatacaccaccctgatcgacggcctgtgcaaggccggcaaagtggacgaggccctggagctgttcgacgagatgaaggagaggggcatcaagcccgacgtggtcacatacaacaccctgatcgacggcctgtgcaaggccggcagactggatgaggccgaggagctgctggaggagatggaggagaagggcatcaagcccgacgagctgacctacaacaccctgatcagcggcctgggcaaggccggcagagccagagacccccccgtgctcagtagcggctccggcggcagcgggggaggcgggcatcatcaccatcaccacggacgctag

SEQ ID NO: 174 - DNA, 2610 bp, Artificial Sequence
  Synthesized Sequence
atggccggagtgttcacactggaggacttcgtgggcgactggagacagaccgccggctacaacctggaccaggtgctggagcagggcggagtgagcagcctgtttcagaacctgggcgtgagcgtcacccccatccagaggatcgtgctgtccggcgagaatggcctgaagatcgacatccacgtcatcatcccctacgagggcctgagcggcgatcagatgggccagatcgagaagatcttcaaggtggtgtatcccgtcgacgaccaccacttcaaggtgatcctgcattacggcaccctcgtgatcgacggcgtgacccctaacatgatcgactacttcggcaggccctacgagggaatcgccgtgttcgacggaaagaagatcaccgtgaccggcaccctgtggaacggaaacaagatcatcgacgagaggctgatcaaccccgacggctccctgctgttcagggtgaccatcaatggcgtgaccggctggagactgtgcgagagaatcctggccggaggcggaggaagcctcgtgcccagaggatccggcggaggcggctccagccggctccatatgggaaactccgtggtcacatacaccaccctgatcgacggcctgtgcaaggccggcaaggtggatgaggccctggagctgttcgacgagatgaaggagaggggcatcaagcccgacgtggtcacatacaacaccctgatcgacggcctgtgcaagagcggcaagatcgaggaggccctgaagctgttcaaggagatggaggagaagggcatcacccccagcgtggtgacatacaacaccctgatcgacggcctgtgcaaggccggcagactggatgaggccgaggagctgctggaggagatggaggagaagggcatcaagcccgacgtggtcacatacaacaccctgatcgacggcctgtgcaaggccggcagactggatgaggccgaggagctgctggaggagatggaggagaagggcatcaagcccgacgtggttacatacaccacactgatcgacggactgtgtaaagccggcgacgtggacgaagccctcgagctgttcaaagagatgcggagcaagggcgtgaagcccaacgtggtcacatacaacaccctgatcgacggcctgtgcaaggccggcagactggatgaggccgaggagctgctggaggagatggaggagaagggcatcaagcccgacgtggttacatacaacaccctgatcgacggcctgtgcaagagcggcaagatcgaggaggccctgaagctgttcaaggagatggaggagaagggcatcacccccagcgtggtcacatacaccacactgatcgacggactgtgtaaagccggcgacgtggacgaagccctcgagctgttcaaagagatgcggagcaagggcgtgaagcccaacgtggtgacatacaccaccctgatcgacggcctgtgcaaggccggcaaagtggacgaggccctggagctgttcgacgagatgaaggagaggggcatcaagcccgacgtggtcacatacaccacactgatcgacggactgtgtaaagccggcgacgtggacgaagccctcgagctgttcaaagagatgcggagcaagggcgtgaagcccaacgtggttacatacaacaccctgatcgacggcctgtgcaagagcggcaagatcgaggaggccctgaagctgttcaaggagatggaggagaagggcatcacccccagcgtggtcacatacaacaccctgatcgacggcctgtgcaaggccggcagactggatgaggccgaggagctgctggaggagatggaggagaagggcatcaagcccgacgtggtcacatacaccaccctgatcgacggcctgtgcaaggccggcaaagtggacgaggccctggagctgttcgacgagatgaaggagaggggcatcaagcccgacgtggtcacatacaccacactgatcgacggactgtgtaaagccggcgacgtggacgaagccctcgagctgttcaaagagatgcggagcaagggcgtgaagcccaacgtggttacatacaacaccctgatcgacggcctgtgcaaggccggcagactggatgaggccgaggagctgctggaggagatggaggagaagggcatcaagcccgacgtggtcacatacaccaccctgatcgacggcctgtgcaaggccggcaaggtggatgaggccctggagctgttcgacgagatgaaggagaggggcatcaagcccgacgtggtgacatacaacaccctgatcgacggcctgtgcaaggccggcagactggatgaggccgaggagctgctggaggagatggaggagaagggcatcaagcccgacgtggtcacatacaacaccctgatcgacggcctgtgcaaggccggcagactggatgaggccgaggagctgctggaggagatggaggagaagggcatcaagcccgacgagctgacctacaacaccctgatcagcggcctgggcaaggccggcagagccagagacccccccgtgctcagtagcggctccggcggcagcgggggaggcgggcatcatcaccatcaccacggacgctag

SEQ ID NO: 175 - DNA, 2610 bp, Artificial Sequence
  Synthesized Sequence
atggccggagtgttcacactggaggacttcgtgggcgactggagacagaccgccggctacaacctggaccaggtgctggagcagggcggagtgagcagcctgtttcagaacctgggcgtgagcgtcacccccatccagaggatcgtgctgtccggcgagaatggcctgaagatcgacatccacgtcatcatcccctacgagggcctgagcggcgatcagatgggccagatcgagaagatcttcaaggtggtgtatcccgtcgacgaccaccacttcaaggtgatcctgcattacggcaccctcgtgatcgacggcgtgacccctaacatgatcgactacttcggcaggccctacgagggaatcgccgtgttcgacggaaagaagatcaccgtgaccggcaccctgtggaacggaaacaagatcatcgacgagaggctgatcaaccccgacggctccctgctgttcagggtgaccatcaatggcgtgaccggctggagactgtgcgagagaatcctggccggaggcggaggaagcctcgtgcccagaggatccggcggaggcggctccagccggctccatatgggaaactccgtggtcacatacaacaccctgatcgacggcctgtgcaagagcggcaagatcgaggaggccctgaagctgttcaaggagatggaggagaagggcatcacccccagcgtggtcacatacaccacactgatcgacggactgtgtaaagccggcgacgtggacgaagccctcgagctgttcaaagagatgcggagcaagggcgtgaagcccaacgtggtcacatacaacaccctgatcgacggcctgtgcaaggccggcagactggatgaggccgaggagctgctggaggagatggaggagaagggcatcaagcccgacgtggtcacatacaccaccctgatcgacggcctgtgcaaggccggcaaggtggacgaagccctggagctgttcgacgagatgaaggagaggggcatcaagcccgacgtggtcacatacaacaccctgatcgacggcctgtgcaaggccggcagactggacgaagccgaggagctgctggaggagatggaggagaagggcatcaagcccgacgtggtcacatacaacaccctgatcgacggcctgtgcaaggccggcagactggatgaggccgaggagctgctggaggagatggaggagaagggcatcaagcccgacgtggtcacatacaacaccctgatcgacggcctgtgcaagagcggcaagatcgaggaggccctgaagctgttcaaggagatggaggagaagggcatcacccccagcgtggtcacatacaccaccctgatcgacggcctgtgcaaggccggcaaggtggacgaagccctggagctgttcgacgagatgaaggagaggggcatcaagcccgacgtggtcacatacaccacactgatcgacggactgtgtaaagccggcgacgtggacgaagccctcgagctgttcaaagagatgcggagcaagggcgtgaagcccaacgtggtcacatacaccacactgatcgacggactgtgtaaagccggcgacgtggacgaagccctcgagctgttcaaagagatgcggagcaagggcgtgaagcccaacgtggtcacatacaacaccctgatcgacggcctgtgcaaggccggcagactggatgaggccgaggagctgctggaggagatggaggagaagggcatcaagcccgacgtggtcacatacaacaccctgatcgacggcctgtgcaaggccggcagactggacgaggccgaagagctgctggaggagatggaggagaagggcatcaagcccgacgtggtcacatacaacaccctgatcgacggcctgtgcaagagcggcaagatcgaggaggccctgaagctgttcaaggagatggaggagaagggcatcacccccagcgtggtcacatacaccaccctgatcgacggcctgtgcaaggccggcaaggtggatgaggccctggagctgttcgacgagatgaaggagaggggcatcaagcccgacgtggtcacatacaacaccctgatcgacggcctgtgcaaggccggcagactggatgaggccgaggagctgctggaggagatggaggagaagggcatcaagcccgacgtggtcacatacaacaccctgatcgacggcctgtgcaaggccggcagactggacgaggccgaagagctgctggaggagatggaggagaagggcatcaagcccgacgtggtcacatacaacaccctgatcgacggcctgtgcaaggccggcagactggacgaagccgaggagctgctggaggagatggaggagaagggcatcaagcccgacgtggtcacatacaacaccctgatcgacggcctgtgcaaggccggcagactggatgaggccgaggagctgctggaggagatggaggagaagggcatcaagcccgacgagctgacctacaacaccctgatcagcggcctgggcaaggccggcagagccagagacccccccgtgctcagtagcggctccggcggcagcgggggaggcgggcatcatcaccatcaccacggacgctag

SEQ ID NO: 176 - DNA, 2610 bp, Artificial Sequence
  Synthesized Sequence
atggccggagtgttcacactggaggacttcgtgggcgactggagacagaccgccggctacaacctggaccaggtgctggagcagggcggagtgagcagcctgtttcagaacctgggcgtgagcgtcacccccatccagaggatcgtgctgtccggcgagaatggcctgaagatcgacatccacgtcatcatcccctacgagggcctgagcggcgatcagatgggccagatcgagaagatcttcaaggtggtgtatcccgtcgacgaccaccacttcaaggtgatcctgcattacggcaccctcgtgatcgacggcgtgacccctaacatgatcgactacttcggcaggccctacgagggaatcgccgtgttcgacggaaagaagatcaccgtgaccggcaccctgtggaacggaaacaagatcatcgacgagaggctgatcaaccccgacggctccctgctgttcagggtgaccatcaatggcgtgaccggctggagactgtgcgagagaatcctggccggaggcggaggaagcctcgtgcccagaggatccggcggaggcggctccagccggctccatatgggaaactccgtggtcacatacaacaccctgatcgacggcctgtgcaaggccggcagactggatgaggccgaggagctgctggaggagatggaggagaagggcatcaagcccgacgtggtcacatacaccaccctgatcgacggcctgtgcaaggccggcaaggtggatgaggccctggagctgttcgacgagatgaaggagaggggcatcaagcccgacgtggtgacatacaacaccctgatcgacggcctgtgcaagagcggcaagatcgaggaggccctgaagctgttcaaggagatggaggagaagggcatcacccccagcgtggtcacatacaacaccctgatcgacggcctgtgcaaggccggcagactggatgaggccgaggagctgctggaggagatggaggagaagggcatcaagcccgacgtggttacatacaccaccctgatcgacggcctgtgcaaggccggcaaagtggacgaggccctggagctgttcgacgagatgaaggagaggggcatcaagcccgacgtggtcacatacaccaccctgatcgacggcctgtgcaaggccggcaaggtggatgaggccctggagctgttcgacgagatgaaggagaggggcatcaagcccgacgtggttacatacaccaccctgatcgacggcctgtgcaaggccggcaaagtggacgaggccctggagctgttcgacgagatgaaggagaggggcatcaagcccgacgtggtcacatacaacaccctgatcgacggcctgtgcaagagcggcaagatcgaggaggccctgaagctgttcaaggagatggaggagaagggcatcacccccagcgtggtgacatacaccacactgatcgacggactgtgtaaagccggcgacgtggacgaagccctcgagctgttcaaagagatgcggagcaagggcgtgaagcccaacgtggtcacatacaccacactgatcgacggactgtgtaaagccggcgacgtggacgaagccctcgagctgttcaaagagatgcggagcaagggcgtgaagcccaacgtggttacatacaccaccctgatcgacggcctgtgcaaggccggcaaagtggacgaggccctggagctgttcgacgagatgaaggagaggggcatcaagcccgacgtggtcacatacaccaccctgatcgacggcctgtgcaaggccggcaaggtggatgaggccctggagctgttcgacgagatgaaggagaggggcatcaagcccgacgtggtcacatacaacaccctgatcgacggcctgtgcaaggccggcagactggatgaggccgaggagctgctggaggagatggaggagaagggcatcaagcccgacgtggtcacatacaccaccctgatcgacggcctgtgcaaggccggcaaggtggatgaggccctggagctgttcgacgagatgaaggagaggggcatcaagcccgacgtggttacatacaccacactgatcgacggactgtgtaaagccggcgacgtggacgaagccctcgagctgttcaaagagatgcggagcaagggcgtgaagcccaacgtggtcacatacaccacactgatcgacggactgtgtaaagccggcgacgtggacgaagccctcgagctgttcaaagagatgcggagcaagggcgtgaagcccaacgtggtgacatacaacaccctgatcgacggcctgtgcaagagcggcaagatcgaggaggccctgaagctgttcaaggagatggaggagaagggcatcacccccagcgtggtcacatacaccaccctgatcgacggcctgtgcaaggccggcaaggtggatgaggccctggagctgttcgacgagatgaaggagaggggcatcaagcccgacgagctgacctacaacaccctgatcagcggcctgggcaaggccggcagagccagagacccccccgtgctcagtagcggctccggcggcagcgggggaggcgggcatcatcaccatcaccacggacgctag

SEQ ID NO: 177 - DNA, 2610 bp, Artificial Sequence
  Synthesized Sequence
atggccggagtgttcacactggaggacttcgtgggcgactggagacagaccgccggctacaacctggaccaggtgctggagcagggcggagtgagcagcctgtttcagaacctgggcgtgagcgtcacccccatccagaggatcgtgctgtccggcgagaatggcctgaagatcgacatccacgtcatcatcccctacgagggcctgagcggcgatcagatgggccagatcgagaagatcttcaaggtggtgtatcccgtcgacgaccaccacttcaaggtgatcctgcattacggcaccctcgtgatcgacggcgtgacccctaacatgatcgactacttcggcaggccctacgagggaatcgccgtgttcgacggaaagaagatcaccgtgaccggcaccctgtggaacggaaacaagatcatcgacgagaggctgatcaaccccgacggctccctgctgttcagggtgaccatcaatggcgtgaccggctggagactgtgcgagagaatcctggccggaggcggaggaagcctcgtgcccagaggatccggcggaggcggctccagccggctccatatgggaaactccgtggtcacatacaacaccctgatcgacggcctgtgcaaggccggcagactggatgaggccgaggagctgctggaggagatggaggagaagggcatcaagcccgacgtggtcacatacaccacactgatcgacggactgtgtaaagccggcgacgtggacgaagccctcgagctgttcaaagagatgcggagcaagggcgtgaagcccaacgtggtgacatacaccaccctgatcgacggcctgtgcaaggccggcaaagtggacgaggccctggagctgttcgacgagatgaaggagaggggcatcaagcccgacgtggtcacatacaacaccctgatcgacggcctgtgcaagagcggcaagatcgaggaggccctgaagctgttcaaggagatggaggagaagggcatcacccccagcgtggttacatacaacaccctgatcgacggcctgtgcaaggccggcagactggatgaggccgaggagctgctggaggagatggaggagaagggcatcaagcccgacgtggtcacatacaacaccctgatcgacggcctgtgcaaggccggcagactggatgaggccgaggagctgctggaggagatggaggagaagggcatcaagcccgacgtggttacatacaccacactgatcgacggactgtgtaaagccggcgacgtggacgaagccctcgagctgttcaaagagatgcggagcaagggcgtgaagcccaacgtggtcacatacaacaccctgatcgacggcctgtgcaaggccggcagactggatgaggccgaggagctgctggaggagatggaggagaagggcatcaagcccgacgtggtgacatacaacaccctgatcgacggcctgtgcaagagcggcaagatcgaggaggccctgaagctgttcaaggagatggaggagaagggcatcacccccagcgtggtcacatacaccacactgatcgacggactgtgtaaagccggcgacgtggacgaagccctcgagctgttcaaagagatgcggagcaagggcgtgaagcccaacgtggttacatacaccaccctgatcgacggcctgtgcaaggccggcaaagtggacgaggccctggagctgttcgacgagatgaaggagaggggcatcaagcccgacgtggtcacatacaccacactgatcgacggactgtgtaaagccggcgacgtggacgaagccctcgagctgttcaaagagatgcggagcaagggcgtgaagcccaacgtggtcacatacaacaccctgatcgacggcctgtgcaagagcggcaagatcgaggaggccctgaagctgttcaaggagatggaggagaagggcatcacccccagcgtggtcacatacaacaccctgatcgacggcctgtgcaaggccggcagactggatgaggccgaggagctgctggaggagatggaggagaagggcatcaagcccgacgtggttacatacaccaccctgatcgacggcctgtgcaaggccggcaaagtggacgaggccctggagctgttcgacgagatgaaggagaggggcatcaagcccgacgtggtcacatacaccacactgatcgacggactgtgtaaagccggcgacgtggacgaagccctcgagctgttcaaagagatgcggagcaagggcgtgaagcccaacgtggtgacatacaacaccctgatcgacggcctgtgcaaggccggcagactggatgaggccgaggagctgctggaggagatggaggagaagggcatcaagcccgacgtggtcacatacaccaccctgatcgacggcctgtgcaaggccggcaaggtggatgaggccctggagctgttcgacgagatgaaggagaggggcatcaagcccgacgagctgacctacaacaccctgatcagcggcctgggcaaggccggcagagccagagacccccccgtgctcagtagcggctccggcggcagcgggggaggcgggcatcatcaccatcaccacggacgctag

SEQ ID NO: 178 - DNA, 2610 bp, Artificial Sequence
  Synthesized Sequence
atggccggagtgttcacactggaggacttcgtgggcgactggagacagaccgccggctacaacctggaccaggtgctggagcagggcggagtgagcagcctgtttcagaacctgggcgtgagcgtcacccccatccagaggatcgtgctgtccggcgagaatggcctgaagatcgacatccacgtcatcatcccctacgagggcctgagcggcgatcagatgggccagatcgagaagatcttcaaggtggtgtatcccgtcgacgaccaccacttcaaggtgatcctgcattacggcaccctcgtgatcgacggcgtgacccctaacatgatcgactacttcggcaggccctacgagggaatcgccgtgttcgacggaaagaagatcaccgtgaccggcaccctgtggaacggaaacaagatcatcgacgagaggctgatcaaccccgacggctccctgctgttcagggtgaccatcaatggcgtgaccggctggagactgtgcgagagaatcctggccggaggcggaggaagcctcgtgcccagaggatccggcggaggcggctccagccggctccatatgggaaactccgtggtcacatacaacaccctgatcgacggcctgtgcaaggccggcagactggacgaagccgaggagctgctggaggagatggaggagaagggcatcaagcccgacgtggtcacatacaacaccctgatcgacggcctgtgcaaggccggcagactggatgaggccgaggagctgctggaggagatggaggagaagggcatcaagcccgacgtggtcacatacaacaccctgatcgacggcctgtgcaaggccggcagactggatgaggccgaggagctgctggaggagatggaggagaagggcatcaagcccgacgtggtcacatacaacaccctgatcgacggcctgtgcaaggccggcagactggacgaggccgaagagctgctggaggagatggaggagaagggcatcaagcccgacgtggtcacatacaccacactgatcgacggactgtgtaaagccggcgacgtggacgaagccctcgagctgttcaaagagatgcggagcaagggcgtgaagcccaacgtggtcacatacaacaccctgatcgacggcctgtgcaaggccggcagactggatgaggccgaggagctgctggaggagatggaggagaagggcatcaagcccgacgtggtcacatacaacaccctgatcgacggcctgtgcaaggccggcagactggatgaggccgaggagctgctggaggagatggaggagaagggcatcaagcccgacgtggtcacatacaccaccctgatcgacggcctgtgcaaggccggcaaggtggacgaagccctggagctgttcgacgagatgaaggagaggggcatcaagcccgacgtggtcacatacaacaccctgatcgacggcctgtgcaaggccggcagactggacgaagccgaggagctgctggaggagatggaggagaagggcatcaagcccgacgtggtcacatacaccaccctgatcgacggcctgtgcaaggccggcaaggtggatgaggccctggagctgttcgacgagatgaaggagaggggcatcaagcccgacgtggtcacatacaacaccctgatcgacggcctgtgcaagagcggcaagatcgaggaggccctgaagctgttcaaggagatggaggagaagggcatcacccccagcgtggtcacatacaacaccctgatcgacggcctgtgcaaggccggcagactggacgaggccgaagagctgctggaggagatggaggagaagggcatcaagcccgacgtggtcacatacaccacactgatcgacggactgtgtaaagccggcgacgtggacgaagccctcgagctgttcaaagagatgcggagcaagggcgtgaagcccaacgtggtcacatacaacaccctgatcgacggcctgtgcaaggccggcagactggatgaggccgaggagctgctggaggagatggaggagaagggcatcaagcccgacgtggtcacatacaccaccctgatcgacggcctgtgcaaggccggcaaagtggacgaggccctggagctgttcgacgagatgaaggagaggggcatcaagcccgacgtggtcacatacaccaccctgatcgacggcctgtgcaaggccggcaaggtggacgaagccctggagctgttcgacgagatgaaggagaggggcatcaagcccgacgtggtcacatacaacaccctgatcgacggcctgtgcaagagcggcaagatcgaggaggccctgaagctgttcaaggagatggaggagaagggcatcacccccagcgtggtcacatacaccacactgatcgacggactgtgtaaagccggcgacgtggacgaagccctcgagctgttcaaagagatgcggagcaagggcgtgaagcccaacgagctgacctacaacaccctgatcagcggcctgggcaaggccggcagagccagagacccccccgtgctcagtagcggctccggcggcagcgggggaggcgggcatcatcaccatcaccacggacgctag

SEQ ID NO: 179 - DNA, 2610 bp, Artificial Sequence
  Synthesized Sequence
atggccggagtgttcacactggaggacttcgtgggcgactggagacagaccgccggctacaacctggaccaggtgctggagcagggcggagtgagcagcctgtttcagaacctgggcgtgagcgtcacccccatccagaggatcgtgctgtccggcgagaatggcctgaagatcgacatccacgtcatcatcccctacgagggcctgagcggcgatcagatgggccagatcgagaagatcttcaaggtggtgtatcccgtcgacgaccaccacttcaaggtgatcctgcattacggcaccctcgtgatcgacggcgtgacccctaacatgatcgactacttcggcaggccctacgagggaatcgccgtgttcgacggaaagaagatcaccgtgaccggcaccctgtggaacggaaacaagatcatcgacgagaggctgatcaaccccgacggctccctgctgttcagggtgaccatcaatggcgtgaccggctggagactgtgcgagagaatcctggccggaggcggaggaagcctcgtgcccagaggatccggcggaggcggctccagccggctccatatgggaaactccgtggtcacatacaacaccctgatcgacggcctgtgcaaggccggcagactggacgaagccgaggagctgctggaggagatggaggagaagggcatcaagcccgacgtggtcacatacaacaccctgatcgacggcctgtgcaagagcggcaagatcgaggaggccctgaagctgttcaaggagatggaggagaagggcatcacccccagcgtggtcacatacaacaccctgatcgacggcctgtgcaagagcggcaagatcgaggaggccctgaagctgttcaaggagatggaggagaagggcatcacccccagcgtggtcacatacaacaccctgatcgacggcctgtgcaaggccggcagactggacgaggccgaagagctgctggaggagatggaggagaagggcatcaagcccgacgtggtcacatacaacaccctgatcgacggcctgtgcaagagcggcaagatcgaggaggccctgaagctgttcaaggagatggaggagaagggcatcacccccagcgtggtcacatacaccacactgatcgacggactgtgtaaagccggcgacgtggacgaagccctcgagctgttcaaagagatgcggagcaagggcgtgaagcccaacgtggtcacatacaacaccctgatcgacggcctgtgcaagagcggcaagatcgaggaggccctgaagctgttcaaggagatggaggagaagggcatcacccccagcgtggtcacatacaacaccctgatcgacggcctgtgcaagagcggcaagatcgaggaggccctgaagctgttcaaggagatggaggagaagggcatcacccccagcgtggtcacatacaccaccctgatcgacggcctgtgcaaggccggcaaggtggacgaagccctggagctgttcgacgagatgaaggagaggggcatcaagcccgacgtggtcacatacaccaccctgatcgacggcctgtgcaaggccggcaaggtggatgaggccctggagctgttcgacgagatgaaggagaggggcatcaagcccgacgtggtcacatacaacaccctgatcgacggcctgtgcaaggccggcagactggatgaggccgaggagctgctggaggagatggaggagaagggcatcaagcccgacgtggtcacatacaccaccctgatcgacggcctgtgcaaggccggcaaggtggacgaagccctggagctgttcgacgagatgaaggagaggggcatcaagcccgacgtggtcacatacaccacactgatcgacggactgtgtaaagccggcgacgtggacgaagccctcgagctgttcaaagagatgcggagcaagggcgtgaagcccaacgtggtcacatacaacaccctgatcgacggcctgtgcaagagcggcaagatcgaggaggccctgaagctgttcaaggagatggaggagaagggcatcacccccagcgtggtcacatacaacaccctgatcgacggcctgtgcaaggccggcagactggatgaggccgaggagctgctggaggagatggaggagaagggcatcaagcccgacgtggtcacatacaccaccctgatcgacggcctgtgcaaggccggcaaggtggacgaagccctggagctgttcgacgagatgaaggagaggggcatcaagcccgacgtggtcacatacaccaccctgatcgacggcctgtgcaaggccggcaaggtggacgaagccctggagctgttcgacgagatgaaggagaggggcatcaagcccgacgtggtcacatacaacaccctgatcgacggcctgtgcaaggccggcagactggatgaggccgaggagctgctggaggagatggaggagaagggcatcaagcccgacgagctgacctacaacaccctgatcagcggcctgggcaaggccggcagagccagagacccccccgtgctcagtagcggctccggcggcagcgggggaggcgggcatcatcaccatcaccacggacgctag

SEQ ID NO: 180 - DNA, 2610 bp, Artificial Sequence
  Synthesized Sequence
atggccggagtgttcacactggaggacttcgtgggcgactggagacagaccgccggctacaacctggaccaggtgctggagcagggcggagtgagcagcctgtttcagaacctgggcgtgagcgtcacccccatccagaggatcgtgctgtccggcgagaatggcctgaagatcgacatccacgtcatcatcccctacgagggcctgagcggcgatcagatgggccagatcgagaagatcttcaaggtggtgtatcccgtcgacgaccaccacttcaaggtgatcctgcattacggcaccctcgtgatcgacggcgtgacccctaacatgatcgactacttcggcaggccctacgagggaatcgccgtgttcgacggaaagaagatcaccgtgaccggcaccctgtggaacggaaacaagatcatcgacgagaggctgatcaaccccgacggctccctgctgttcagggtgaccatcaatggcgtgaccggctggagactgtgcgagagaatcctggccggaggcggaggaagcctcgtgcccagaggatccggcggaggcggctccagccggctccatatgggaaactccgtggtcacatacaacaccctgatcgacggcctgtgcaaggccggcagactggacgaagccgaggagctgctggaggagatggaggagaagggcatcaagcccgacgtggtcacatacaccaccctgatcgacggcctgtgcaaggccggcaaggtggatgaggccctggagctgttcgacgagatgaaggagaggggcatcaagcccgacgtggtcacatacaacaccctgatcgacggcctgtgcaaggccggcagactggatgaggccgaggagctgctggaggagatggaggagaagggcatcaagcccgacgtggtcacatacaacaccctgatcgacggcctgtgcaaggccggcagactggacgaggccgaagagctgctggaggagatggaggagaagggcatcaagcccgacgtggtcacatacaacaccctgatcgacggcctgtgcaaggccggcagactggacgaagccgaggagctgctggaggagatggaggagaagggcatcaagcccgacgtggtcacatacaacaccctgatcgacggcctgtgcaaggccggcagactggatgaggccgaggagctgctggaggagatggaggagaagggcatcaagcccgacgtggtcacatacaccaccctgatcgacggcctgtgcaaggccggcaaagtggacgaggccctggagctgttcgacgagatgaaggagaggggcatcaagcccgacgtggtcacatacaccaccctgatcgacggcctgtgcaaggccggcaaggtggacgaagccctggagctgttcgacgagatgaaggagaggggcatcaagcccgacgtggtcacatacaacaccctgatcgacggcctgtgcaaggccggcagactggacgaagccgaggagctgctggaggagatggaggagaagggcatcaagcccgacgtggtcacatacaacaccctgatcgacggcctgtgcaaggccggcagactggatgaggccgaggagctgctggaggagatggaggagaagggcatcaagcccgacgtggtcacatacaccacactgatcgacggactgtgtaaagccggcgacgtggacgaagccctcgagctgttcaaagagatgcggagcaagggcgtgaagcccaacgtggtcacatacaccacactgatcgacggactgtgtaaagccggcgacgtggacgaagccctcgagctgttcaaagagatgcggagcaagggcgtgaagcccaacgtggtcacatacaacaccctgatcgacggcctgtgcaaggccggcagactggacgaagccgaggagctgctggaggagatggaggagaagggcatcaagcccgacgtggtcacatacaccacactgatcgacggactgtgtaaagccggcgacgtggacgaagccctcgagctgttcaaagagatgcggagcaagggcgtgaagcccaacgtggtcacatacaccacactgatcgacggactgtgtaaagccggcgacgtggacgaagccctcgagctgttcaaagagatgcggagcaagggcgtgaagcccaacgtggtcacatacaccacactgatcgacggactgtgtaaagccggcgacgtggacgaagccctcgagctgttcaaagagatgcggagcaagggcgtgaagcccaacgtggtcacatacaccacactgatcgacggactgtgtaaagccggcgacgtggacgaagccctcgagctgttcaaagagatgcggagcaagggcgtgaagcccaacgtggtcacatacaacaccctgatcgacggcctgtgcaagagcggcaagatcgaggaggccctgaagctgttcaaggagatggaggagaagggcatcacccccagcgagctgacctacaacaccctgatcagcggcctgggcaaggccggcagagccagagacccccccgtgctcagtagcggctccggcggcagcgggggaggcgggcatcatcaccatcaccacggacgctag

SEQ ID NO: 181 - DNA, 2610 bp, Artificial Sequence
  Synthesized Sequence
atggccggagtgttcacactggaggacttcgtgggcgactggagacagaccgccggctacaacctggaccaggtgctggagcagggcggagtgagcagcctgtttcagaacctgggcgtgagcgtcacccccatccagaggatcgtgctgtccggcgagaatggcctgaagatcgacatccacgtcatcatcccctacgagggcctgagcggcgatcagatgggccagatcgagaagatcttcaaggtggtgtatcccgtcgacgaccaccacttcaaggtgatcctgcattacggcaccctcgtgatcgacggcgtgacccctaacatgatcgactacttcggcaggccctacgagggaatcgccgtgttcgacggaaagaagatcaccgtgaccggcaccctgtggaacggaaacaagatcatcgacgagaggctgatcaaccccgacggctccctgctgttcagggtgaccatcaatggcgtgaccggctggagactgtgcgagagaatcctggccggaggcggaggaagcctcgtgcccagaggatccggcggaggcggctccagccggctccatatgggaaactccgtggtcacatacaacaccctgatcgacggcctgtgcaagagcggcaagatcgaggaggccctgaagctgttcaaggagatggaggagaagggcatcacccccagcgtggtcacatacaacaccctgatcgacggcctgtgcaagagcggcaagatcgaggaggccctgaagctgttcaaggagatggaggagaagggcatcacccccagcgtggtgacatacaacaccctgatcgacggcctgtgcaaggccggcagactggatgaggccgaggagctgctggaggagatggaggagaagggcatcaagcccgacgtggtcacatacaccaccctgatcgacggcctgtgcaaggccggcaaggtggatgaggccctggagctgttcgacgagatgaaggagaggggcatcaagcccgacgtggttacatacaacaccctgatcgacggcctgtgcaaggccggcagactggatgaggccgaggagctgctggaggagatggaggagaagggcatcaagcccgacgtggtcacatacaacaccctgatcgacggcctgtgcaaggccggcagactggatgaggccgaggagctgctggaggagatggaggagaagggcatcaagcccgacgtggttacatacaccacactgatcgacggactgtgtaaagccggcgacgtggacgaagccctcgagctgttcaaagagatgcggagcaagggcgtgaagcccaacgtggtcacatacaacaccctgatcgacggcctgtgcaaggccggcagactggatgaggccgaggagctgctggaggagatggaggagaagggcatcaagcccgacgtggtgacatacaccaccctgatcgacggcctgtgcaaggccggcaaagtggacgaggccctggagctgttcgacgagatgaaggagaggggcatcaagcccgacgtggtcacatacaacaccctgatcgacggcctgtgcaaggccggcagactggatgaggccgaggagctgctggaggagatggaggagaagggcatcaagcccgacgtggttacatacaccaccctgatcgacggcctgtgcaaggccggcaaagtggacgaggccctggagctgttcgacgagatgaaggagaggggcatcaagcccgacgtggtcacatacaacaccctgatcgacggcctgtgcaaggccggcagactggatgaggccgaggagctgctggaggagatggaggagaagggcatcaagcccgacgtggtcacatacaccaccctgatcgacggcctgtgcaaggccggcaaagtggacgaggccctggagctgttcgacgagatgaaggagaggggcatcaagcccgacgtggtcacatacaacaccctgatcgacggcctgtgcaaggccggcagactggatgaggccgaggagctgctggaggagatggaggagaagggcatcaagcccgacgtggttacatacaccaccctgatcgacggcctgtgcaaggccggcaaagtggacgaggccctggagctgttcgacgagatgaaggagaggggcatcaagcccgacgtggtcacatacaccacactgatcgacggactgtgtaaagccggcgacgtggacgaagccctcgagctgttcaaagagatgcggagcaagggcgtgaagcccaacgtggtgacatacaacaccctgatcgacggcctgtgcaaggccggcagactggatgaggccgaggagctgctggaggagatggaggagaagggcatcaagcccgacgtggtcacatacaacaccctgatcgacggcctgtgcaaggccggcagactggatgaggccgaggagctgctggaggagatggaggagaagggcatcaagcccgacgagctgacctacaacaccctgatcagcggcctgggcaaggccggcagagccagagacccccccgtgctcagtagcggctccggcggcagcgggggaggcgggcatcatcaccatcaccacggacgctag

SEQ ID NO: 182 - DNA, 2610 bp, Artificial Sequence
  Synthesized Sequence
atggccggagtgttcacactggaggacttcgtgggcgactggagacagaccgccggctacaacctggaccaggtgctggagcagggcggagtgagcagcctgtttcagaacctgggcgtgagcgtcacccccatccagaggatcgtgctgtccggcgagaatggcctgaagatcgacatccacgtcatcatcccctacgagggcctgagcggcgatcagatgggccagatcgagaagatcttcaaggtggtgtatcccgtcgacgaccaccacttcaaggtgatcctgcattacggcaccctcgtgatcgacggcgtgacccctaacatgatcgactacttcggcaggccctacgagggaatcgccgtgttcgacggaaagaagatcaccgtgaccggcaccctgtggaacggaaacaagatcatcgacgagaggctgatcaaccccgacggctccctgctgttcagggtgaccatcaatggcgtgaccggctggagactgtgcgagagaatcctggccggaggcggaggaagcctcgtgcccagaggatccggcggaggcggctccagccggctccatatgggaaactccgtggtcacatacaacaccctgatcgacggcctgtgcaagagcggcaagatcgaggaggccctgaagctgttcaaggagatggaggagaagggcatcacccccagcgtggtcacatacaacaccctgatcgacggcctgtgcaaggccggcagactggatgaggccgaggagctgctggaggagatggaggagaagggcatcaagcccgacgtggtgacatacaccaccctgatcgacggcctgtgcaaggccggcaaagtggacgaggccctggagctgttcgacgagatgaaggagaggggcatcaagcccgacgtggtcacatacaccacactgatcgacggactgtgtaaagccggcgacgtggacgaagccctcgagctgttcaaagagatgcggagcaagggcgtgaagcccaacgtggttacatacaccaccctgatcgacggcctgtgcaaggccggcaaagtggacgaggccctggagctgttcgacgagatgaaggagaggggcatcaagcccgacgtggtcacatacaccacactgatcgacggactgtgtaaagccggcgacgtggacgaagccctcgagctgttcaaagagatgcggagcaagggcgtgaagcccaacgtggttacatacaccaccctgatcgacggcctgtgcaaggccggcaaagtggacgaggccctggagctgttcgacgagatgaaggagaggggcatcaagcccgacgtggtcacatacaacaccctgatcgacggcctgtgcaaggccggcagactggatgaggccgaggagctgctggaggagatggaggagaagggcatcaagcccgacgtggtgacatacaacaccctgatcgacggcctgtgcaaggccggcagactggatgaggccgaggagctgctggaggagatggaggagaagggcatcaagcccgacgtggtcacatacaccaccctgatcgacggcctgtgcaaggccggcaaggtggatgaggccctggagctgttcgacgagatgaaggagaggggcatcaagcccgacgtggttacatacaccaccctgatcgacggcctgtgcaaggccggcaaagtggacgaggccctggagctgttcgacgagatgaaggagaggggcatcaagcccgacgtggtcacatacaacaccctgatcgacggcctgtgcaagagcggcaagatcgaggaggccctgaagctgttcaaggagatggaggagaagggcatcacccccagcgtggtcacatacaccacactgatcgacggactgtgtaaagccggcgacgtggacgaagccctcgagctgttcaaagagatgcggagcaagggcgtgaagcccaacgtggtcacatacaacaccctgatcgacggcctgtgcaaggccggcagactggatgaggccgaggagctgctggaggagatggaggagaagggcatcaagcccgacgtggttacatacaccaccctgatcgacggcctgtgcaaggccggcaaagtggacgaggccctggagctgttcgacgagatgaaggagaggggcatcaagcccgacgtggtcacatacaccacactgatcgacggactgtgtaaagccggcgacgtggacgaagccctcgagctgttcaaagagatgcggagcaagggcgtgaagcccaacgtggtgacatacaccacactgatcgacggactgtgtaaagccggcgacgtggacgaagccctcgagctgttcaaagagatgcggagcaagggcgtgaagcccaacgtggtcacatacaacaccctgatcgacggcctgtgcaaggccggcagactggatgaggccgaggagctgctggaggagatggaggagaagggcatcaagcccgacgagctgacctacaacaccctgatcagcggcctgggcaaggccggcagagccagagacccccccgtgctcagtagcggctccggcggcagcgggggaggcgggcatcatcaccatcaccacggacgctag

SEQ ID NO: 183 - DNA, 2610 bp, Artificial Sequence
  Synthesized Sequence
atggccggagtgttcacactggaggacttcgtgggcgactggagacagaccgccggctacaacctggaccaggtgctggagcagggcggagtgagcagcctgtttcagaacctgggcgtgagcgtcacccccatccagaggatcgtgctgtccggcgagaatggcctgaagatcgacatccacgtcatcatcccctacgagggcctgagcggcgatcagatgggccagatcgagaagatcttcaaggtggtgtatcccgtcgacgaccaccacttcaaggtgatcctgcattacggcaccctcgtgatcgacggcgtgacccctaacatgatcgactacttcggcaggccctacgagggaatcgccgtgttcgacggaaagaagatcaccgtgaccggcaccctgtggaacggaaacaagatcatcgacgagaggctgatcaaccccgacggctccctgctgttcagggtgaccatcaatggcgtgaccggctggagactgtgcgagagaatcctggccggaggcggaggaagcctcgtgcccagaggatccggcggaggcggctccagccggctccatatgggaaactccgtggtcacatacaacaccctgatcgacggcctgtgcaagagcggcaagatcgaggaggccctgaagctgttcaaggagatggaggagaagggcatcacccccagcgtggtcacatacaccacactgatcgacggactgtgtaaagccggcgacgtggacgaagccctcgagctgttcaaagagatgcggagcaagggcgtgaagcccaacgtggtgacatacaccacactgatcgacggactgtgtaaagccggcgacgtggacgaagccctcgagctgttcaaagagatgcggagcaagggcgtgaagcccaacgtggtcacatacaacaccctgatcgacggcctgtgcaagagcggcaagatcgaggaggccctgaagctgttcaaggagatggaggagaagggcatcacccccagcgtggttacatacaacaccctgatcgacggcctgtgcaagagcggcaagatcgaggaggccctgaagctgttcaaggagatggaggagaagggcatcacccccagcgtggtcacatacaccacactgatcgacggactgtgtaaagccggcgacgtggacgaagccctcgagctgttcaaagagatgcggagcaagggcgtgaagcccaacgtggttacatacaacaccctgatcgacggcctgtgcaaggccggcagactggatgaggccgaggagctgctggaggagatggaggagaagggcatcaagcccgacgtggtcacatacaccaccctgatcgacggcctgtgcaaggccggcaaggtggatgaggccctggagctgttcgacgagatgaaggagaggggcatcaagcccgacgtggtgacatacaacaccctgatcgacggcctgtgcaagagcggcaagatcgaggaggccctgaagctgttcaaggagatggaggagaagggcatcacccccagcgtggtcacatacaccacactgatcgacggactgtgtaaagccggcgacgtggacgaagccctcgagctgttcaaagagatgcggagcaagggcgtgaagcccaacgtggttacatacaacaccctgatcgacggcctgtgcaaggccggcagactggatgaggccgaggagctgctggaggagatggaggagaagggcatcaagcccgacgtggtcacatacaacaccctgatcgacggcctgtgcaagagcggcaagatcgaggaggccctgaagctgttcaaggagatggaggagaagggcatcacccccagcgtggtcacatacaacaccctgatcgacggcctgtgcaaggccggcagactggatgaggccgaggagctgctggaggagatggaggagaagggcatcaagcccgacgtggtcacatacaacaccctgatcgacggcctgtgcaaggccggcagactggatgaggccgaggagctgctggaggagatggaggagaagggcatcaagcccgacgtggttacatacaccaccctgatcgacggcctgtgcaaggccggcaaagtggacgaggccctggagctgttcgacgagatgaaggagaggggcatcaagcccgacgtggtcacatacaccaccctgatcgacggcctgtgcaaggccggcaaggtggatgaggccctggagctgttcgacgagatgaaggagaggggcatcaagcccgacgtggtgacatacaccacactgatcgacggactgtgtaaagccggcgacgtggacgaagccctcgagctgttcaaagagatgcggagcaagggcgtgaagcccaacgtggtcacatacaccacactgatcgacggactgtgtaaagccggcgacgtggacgaagccctcgagctgttcaaagagatgcggagcaagggcgtgaagcccaacgagctgacctacaacaccctgatcagcggcctgggcaaggccggcagagccagagacccccccgtgctcagtagcggctccggcggcagcgggggaggcgggcatcatcaccatcaccacggacgctag

SEQ ID NO: 184 - DNA, 2610 bp, Artificial Sequence
  Synthesized Sequence
atggccggagtgttcacactggaggacttcgtgggcgactggagacagaccgccggctacaacctggaccaggtgctggagcagggcggagtgagcagcctgtttcagaacctgggcgtgagcgtcacccccatccagaggatcgtgctgtccggcgagaatggcctgaagatcgacatccacgtcatcatcccctacgagggcctgagcggcgatcagatgggccagatcgagaagatcttcaaggtggtgtatcccgtcgacgaccaccacttcaaggtgatcctgcattacggcaccctcgtgatcgacggcgtgacccctaacatgatcgactacttcggcaggccctacgagggaatcgccgtgttcgacggaaagaagatcaccgtgaccggcaccctgtggaacggaaacaagatcatcgacgagaggctgatcaaccccgacggctccctgctgttcagggtgaccatcaatggcgtgaccggctggagactgtgcgagagaatcctggccggaggcggaggaagcctcgtgcccagaggatccggcggaggcggctccagccggctccatatgggaaactccgtggtcacatacaccaccctgatcgacggcctgtgcaaggccggcaaggtggatgaggccctggagctgttcgacgagatgaaggagaggggcatcaagcccgacgtggtcacatacaacaccctgatcgacggcctgtgcaaggccggcagactggatgaggccgaggagctgctggaggagatggaggagaagggcatcaagcccgacgtggtgacatacaccaccctgatcgacggcctgtgcaaggccggcaaagtggacgaggccctggagctgttcgacgagatgaaggagaggggcatcaagcccgacgtggtcacatacaacaccctgatcgacggcctgtgcaagagcggcaagatcgaggaggccctgaagctgttcaaggagatggaggagaagggcatcacccccagcgtggttacatacaacaccctgatcgacggcctgtgcaaggccggcagactggatgaggccgaggagctgctggaggagatggaggagaagggcatcaagcccgacgtggtcacatacaccaccctgatcgacggcctgtgcaaggccggcaaggtggatgaggccctggagctgttcgacgagatgaaggagaggggcatcaagcccgacgtggttacatacaccacactgatcgacggactgtgtaaagccggcgacgtggacgaagccctcgagctgttcaaagagatgcggagcaagggcgtgaagcccaacgtggtcacatacaacaccctgatcgacggcctgtgcaaggccggcagactggatgaggccgaggagctgctggaggagatggaggagaagggcatcaagcccgacgtggtgacatacaacaccctgatcgacggcctgtgcaaggccggcagactggatgaggccgaggagctgctggaggagatggaggagaagggcatcaagcccgacgtggtcacatacaacaccctgatcgacggcctgtgcaagagcggcaagatcgaggaggccctgaagctgttcaaggagatggaggagaagggcatcacccccagcgtggttacatacaacaccctgatcgacggcctgtgcaagagcggcaagatcgaggaggccctgaagctgttcaaggagatggaggagaagggcatcacccccagcgtggtcacatacaacaccctgatcgacggcctgtgcaaggccggcagactggatgaggccgaggagctgctggaggagatggaggagaagggcatcaagcccgacgtggtcacatacaccacactgatcgacggactgtgtaaagccggcgacgtggacgaagccctcgagctgttcaaagagatgcggagcaagggcgtgaagcccaacgtggtcacatacaccaccctgatcgacggcctgtgcaaggccggcaaggtggatgaggccctggagctgttcgacgagatgaaggagaggggcatcaagcccgacgtggttacatacaccacactgatcgacggactgtgtaaagccggcgacgtggacgaagccctcgagctgttcaaagagatgcggagcaagggcgtgaagcccaacgtggtcacatacaacaccctgatcgacggcctgtgcaagagcggcaagatcgaggaggccctgaagctgttcaaggagatggaggagaagggcatcacccccagcgtggtgacatacaacaccctgatcgacggcctgtgcaaggccggcagactggatgaggccgaggagctgctggaggagatggaggagaagggcatcaagcccgacgtggtcacatacaacaccctgatcgacggcctgtgcaaggccggcagactggatgaggccgaggagctgctggaggagatggaggagaagggcatcaagcccgacgagctgacctacaacaccctgatcagcggcctgggcaaggccggcagagccagagacccccccgtgctcagtagcggctccggcggcagcgggggaggcgggcatcatcaccatcaccacggacgctag

SEQ ID NO: 185 - DNA, 2610 bp, Artificial Sequence
  Synthesized Sequence
atggccggagtgttcacactggaggacttcgtgggcgactggagacagaccgccggctacaacctggaccaggtgctggagcagggcggagtgagcagcctgtttcagaacctgggcgtgagcgtcacccccatccagaggatcgtgctgtccggcgagaatggcctgaagatcgacatccacgtcatcatcccctacgagggcctgagcggcgatcagatgggccagatcgagaagatcttcaaggtggtgtatcccgtcgacgaccaccacttcaaggtgatcctgcattacggcaccctcgtgatcgacggcgtgacccctaacatgatcgactacttcggcaggccctacgagggaatcgccgtgttcgacggaaagaagatcaccgtgaccggcaccctgtggaacggaaacaagatcatcgacgagaggctgatcaaccccgacggctccctgctgttcagggtgaccatcaatggcgtgaccggctggagactgtgcgagagaatcctggccggaggcggaggaagcctcgtgcccagaggatccggcggaggcggctccagccggctccatatgggaaactccgtggtcacatacaacaccctgatcgacggcctgtgcaagagcggcaagatcgaggaggccctgaagctgttcaaggagatggaggagaagggcatcacccccagcgtggtcacatacaccaccctgatcgacggcctgtgcaaggccggcaaggtggatgaggccctggagctgttcgacgagatgaaggagaggggcatcaagcccgacgtggtcacatacaacaccctgatcgacggcctgtgcaagagcggcaagatcgaggaggccctgaagctgttcaaggagatggaggagaagggcatcacccccagcgtggtcacatacaacaccctgatcgacggcctgtgcaaggccggcagactggacgaggccgaagagctgctggaggagatggaggagaagggcatcaagcccgacgtggtcacatacaccaccctgatcgacggcctgtgcaaggccggcaaggtggacgaagccctggagctgttcgacgagatgaaggagaggggcatcaagcccgacgtggtcacatacaccacactgatcgacggactgtgtaaagccggcgacgtggacgaagccctcgagctgttcaaagagatgcggagcaagggcgtgaagcccaacgtggtcacatacaccaccctgatcgacggcctgtgcaaggccggcaaagtggacgaggccctggagctgttcgacgagatgaaggagaggggcatcaagcccgacgtggtcacatacaacaccctgatcgacggcctgtgcaagagcggcaagatcgaggaggccctgaagctgttcaaggagatggaggagaagggcatcacccccagcgtggtcacatacaacaccctgatcgacggcctgtgcaaggccggcagactggacgaagccgaggagctgctggaggagatggaggagaagggcatcaagcccgacgtggtcacatacaccaccctgatcgacggcctgtgcaaggccggcaaggtggatgaggccctggagctgttcgacgagatgaaggagaggggcatcaagcccgacgtggtcacatacaacaccctgatcgacggcctgtgcaagagcggcaagatcgaggaggccctgaagctgttcaaggagatggaggagaagggcatcacccccagcgtggtcacatacaacaccctgatcgacggcctgtgcaaggccggcagactggacgaggccgaagagctgctggaggagatggaggagaagggcatcaagcccgacgtggtcacatacaccaccctgatcgacggcctgtgcaaggccggcaaggtggacgaagccctggagctgttcgacgagatgaaggagaggggcatcaagcccgacgtggtcacatacaacaccctgatcgacggcctgtgcaagagcggcaagatcgaggaggccctgaagctgttcaaggagatggaggagaagggcatcacccccagcgtggtcacatacaacaccctgatcgacggcctgtgcaagagcggcaagatcgaggaggccctgaagctgttcaaggagatggaggagaagggcatcacccccagcgtggtcacatacaacaccctgatcgacggcctgtgcaaggccggcagactggacgaggccgaagagctgctggaggagatggaggagaagggcatcaagcccgacgtggtcacatacaccaccctgatcgacggcctgtgcaaggccggcaaggtggacgaagccctggagctgttcgacgagatgaaggagaggggcatcaagcccgacgtggtcacatacaccaccctgatcgacggcctgtgcaaggccggcaaggtggatgaggccctggagctgttcgacgagatgaaggagaggggcatcaagcccgacgagctgacctacaacaccctgatcagcggcctgggcaaggccggcagagccagagacccccccgtgctcagtagcggctccggcggcagcgggggaggcgggcatcatcaccatcaccacggacgctag

SEQ ID NO: 186 - DNA, 2610 bp, Artificial Sequence
  Synthesized Sequence
atggccggagtgttcacactggaggacttcgtgggcgactggagacagaccgccggctacaacctggaccaggtgctggagcagggcggagtgagcagcctgtttcagaacctgggcgtgagcgtcacccccatccagaggatcgtgctgtccggcgagaatggcctgaagatcgacatccacgtcatcatcccctacgagggcctgagcggcgatcagatgggccagatcgagaagatcttcaaggtggtgtatcccgtcgacgaccaccacttcaaggtgatcctgcattacggcaccctcgtgatcgacggcgtgacccctaacatgatcgactacttcggcaggccctacgagggaatcgccgtgttcgacggaaagaagatcaccgtgaccggcaccctgtggaacggaaacaagatcatcgacgagaggctgatcaaccccgacggctccctgctgttcagggtgaccatcaatggcgtgaccggctggagactgtgcgagagaatcctggccggaggcggaggaagcctcgtgcccagaggatccggcggaggcggctccagccggctccatatgggaaactccgtggtcacatacaacaccctgatcgacggcctgtgcaaggccggcagactggacgaagccgaggagctgctggaggagatggaggagaagggcatcaagcccgacgtggtcacatacaccaccctgatcgacggcctgtgcaaggccggcaaggtggatgaggccctggagctgttcgacgagatgaaggagaggggcatcaagcccgacgtggtcacatacaacaccctgatcgacggcctgtgcaaggccggcagactggatgaggccgaggagctgctggaggagatggaggagaagggcatcaagcccgacgtggtcacatacaccaccctgatcgacggcctgtgcaaggccggcaaggtggacgaagccctggagctgttcgacgagatgaaggagaggggcatcaagcccgacgtggtcacatacaacaccctgatcgacggcctgtgcaagagcggcaagatcgaggaggccctgaagctgttcaaggagatggaggagaagggcatcacccccagcgtggtcacatacaacaccctgatcgacggcctgtgcaaggccggcagactggatgaggccgaggagctgctggaggagatggaggagaagggcatcaagcccgacgtggtcacatacaccacactgatcgacggactgtgtaaagccggcgacgtggacgaagccctcgagctgttcaaagagatgcggagcaagggcgtgaagcccaacgtggtcacatacaacaccctgatcgacggcctgtgcaaggccggcagactggacgaggccgaagagctgctggaggagatggaggagaagggcatcaagcccgacgtggtcacatacaccaccctgatcgacggcctgtgcaaggccggcaaggtggacgaagccctggagctgttcgacgagatgaaggagaggggcatcaagcccgacgtggtcacatacaccaccctgatcgacggcctgtgcaaggccggcaaggtggatgaggccctggagctgttcgacgagatgaaggagaggggcatcaagcccgacgtggtcacatacaacaccctgatcgacggcctgtgcaagagcggcaagatcgaggaggccctgaagctgttcaaggagatggaggagaagggcatcacccccagcgtggtcacatacaccacactgatcgacggactgtgtaaagccggcgacgtggacgaagccctcgagctgttcaaagagatgcggagcaagggcgtgaagcccaacgtggtcacatacaccacactgatcgacggactgtgtaaagccggcgacgtggacgaagccctcgagctgttcaaagagatgcggagcaagggcgtgaagcccaacgtggtcacatacaccacactgatcgacggactgtgtaaagccggcgacgtggacgaagccctcgagctgttcaaagagatgcggagcaagggcgtgaagcccaacgtggtcacatacaacaccctgatcgacggcctgtgcaaggccggcagactggatgaggccgaggagctgctggaggagatggaggagaagggcatcaagcccgacgtggtcacatacaacaccctgatcgacggcctgtgcaagagcggcaagatcgaggaggccctgaagctgttcaaggagatggaggagaagggcatcacccccagcgtggtcacatacaacaccctgatcgacggcctgtgcaaggccggcagactggacgaagccgaggagctgctggaggagatggaggagaagggcatcaagcccgacgtggtcacatacaccaccctgatcgacggcctgtgcaaggccggcaaggtggatgaggccctggagctgttcgacgagatgaaggagaggggcatcaagcccgacgagctgacctacaacaccctgatcagcggcctgggcaaggccggcagagccagagacccccccgtgctcagtagcggctccggcggcagcgggggaggcgggcatcatcaccatcaccacggacgctag

SEQ ID NO: 187 - DNA, 2610 bp, Artificial Sequence
  Synthesized Sequence
atggccggagtgttcacactggaggacttcgtgggcgactggagacagaccgccggctacaacctggaccaggtgctggagcagggcggagtgagcagcctgtttcagaacctgggcgtgagcgtcacccccatccagaggatcgtgctgtccggcgagaatggcctgaagatcgacatccacgtcatcatcccctacgagggcctgagcggcgatcagatgggccagatcgagaagatcttcaaggtggtgtatcccgtcgacgaccaccacttcaaggtgatcctgcattacggcaccctcgtgatcgacggcgtgacccctaacatgatcgactacttcggcaggccctacgagggaatcgccgtgttcgacggaaagaagatcaccgtgaccggcaccctgtggaacggaaacaagatcatcgacgagaggctgatcaaccccgacggctccctgctgttcagggtgaccatcaatggcgtgaccggctggagactgtgcgagagaatcctggccggaggcggaggaagcctcgtgcccagaggatccggcggaggcggctccagccggctccatatgggaaactccgtggtcacatacaacaccctgatcgacggcctgtgcaaggccggcagactggacgaagccgaggagctgctggaggagatggaggagaagggcatcaagcccgacgtggtcacatacaacaccctgatcgacggcctgtgcaaggccggcagactggatgaggccgaggagctgctggaggagatggaggagaagggcatcaagcccgacgtggtcacatacaccaccctgatcgacggcctgtgcaaggccggcaaagtggacgaggccctggagctgttcgacgagatgaaggagaggggcatcaagcccgacgtggtcacatacaacaccctgatcgacggcctgtgcaaggccggcagactggacgaggccgaagagctgctggaggagatggaggagaagggcatcaagcccgacgtggtcacatacaacaccctgatcgacggcctgtgcaaggccggcagactggacgaagccgaggagctgctggaggagatggaggagaagggcatcaagcccgacgtggtcacatacaacaccctgatcgacggcctgtgcaaggccggcagactggatgaggccgaggagctgctggaggagatggaggagaagggcatcaagcccgacgtggtcacatacaccaccctgatcgacggcctgtgcaaggccggcaaagtggacgaggccctggagctgttcgacgagatgaaggagaggggcatcaagcccgacgtggtcacatacaacaccctgatcgacggcctgtgcaagagcggcaagatcgaggaggccctgaagctgttcaaggagatggaggagaagggcatcacccccagcgtggtcacatacaacaccctgatcgacggcctgtgcaaggccggcagactggacgaagccgaggagctgctggaggagatggaggagaagggcatcaagcccgacgtggtcacatacaacaccctgatcgacggcctgtgcaaggccggcagactggatgaggccgaggagctgctggaggagatggaggagaagggcatcaagcccgacgtggtcacatacaacaccctgatcgacggcctgtgcaaggccggcagactggatgaggccgaggagctgctggaggagatggaggagaagggcatcaagcccgacgtggtcacatacaccaccctgatcgacggcctgtgcaaggccggcaaggtggacgaagccctggagctgttcgacgagatgaaggagaggggcatcaagcccgacgtggtcacatacaacaccctgatcgacggcctgtgcaagagcggcaagatcgaggaggccctgaagctgttcaaggagatggaggagaagggcatcacccccagcgtggtcacatacaacaccctgatcgacggcctgtgcaaggccggcagactggatgaggccgaggagctgctggaggagatggaggagaagggcatcaagcccgacgtggtcacatacaccacactgatcgacggactgtgtaaagccggcgacgtggacgaagccctcgagctgttcaaagagatgcggagcaagggcgtgaagcccaacgtggtcacatacaccacactgatcgacggactgtgtaaagccggcgacgtggacgaagccctcgagctgttcaaagagatgcggagcaagggcgtgaagcccaacgtggtcacatacaccacactgatcgacggactgtgtaaagccggcgacgtggacgaagccctcgagctgttcaaagagatgcggagcaagggcgtgaagcccaacgtggtcacatacaccaccctgatcgacggcctgtgcaaggccggcaaggtggatgaggccctggagctgttcgacgagatgaaggagaggggcatcaagcccgacgagctgacctacaacaccctgatcagcggcctgggcaaggccggcagagccagagacccccccgtgctcagtagcggctccggcggcagcgggggaggcgggcatcatcaccatcaccacggacgctag

SEQ ID NO: 188 - DNA, 2610 bp, Artificial Sequence
  Synthesized Sequence
atggccggagtgttcacactggaggacttcgtgggcgactggagacagaccgccggctacaacctggaccaggtgctggagcagggcggagtgagcagcctgtttcagaacctgggcgtgagcgtcacccccatccagaggatcgtgctgtccggcgagaatggcctgaagatcgacatccacgtcatcatcccctacgagggcctgagcggcgatcagatgggccagatcgagaagatcttcaaggtggtgtatcccgtcgacgaccaccacttcaaggtgatcctgcattacggcaccctcgtgatcgacggcgtgacccctaacatgatcgactacttcggcaggccctacgagggaatcgccgtgttcgacggaaagaagatcaccgtgaccggcaccctgtggaacggaaacaagatcatcgacgagaggctgatcaaccccgacggctccctgctgttcagggtgaccatcaatggcgtgaccggctggagactgtgcgagagaatcctggccggaggcggaggaagcctcgtgcccagaggatccggcggaggcggctccagccggctccatatgggaaactccgtggtcacatacaccacactgatcgacggactgtgtaaagccggcgacgtggacgaagccctcgagctgttcaaagagatgcggagcaagggcgtgaagcccaacgtggtcacatacaacaccctgatcgacggcctgtgcaagagcggcaagatcgaggaggccctgaagctgttcaaggagatggaggagaagggcatcacccccagcgtggtgacatacaccaccctgatcgacggcctgtgcaaggccggcaaagtggacgaggccctggagctgttcgacgagatgaaggagaggggcatcaagcccgacgtggtcacatacaacaccctgatcgacggcctgtgcaaggccggcagactggatgaggccgaggagctgctggaggagatggaggagaagggcatcaagcccgacgtggttacatacaacaccctgatcgacggcctgtgcaagagcggcaagatcgaggaggccctgaagctgttcaaggagatggaggagaagggcatcacccccagcgtggtcacatacaacaccctgatcgacggcctgtgcaagagcggcaagatcgaggaggccctgaagctgttcaaggagatggaggagaagggcatcacccccagcgtggttacatacaacaccctgatcgacggcctgtgcaagagcggcaagatcgaggaggccctgaagctgttcaaggagatggaggagaagggcatcacccccagcgtggtcacatacaccaccctgatcgacggcctgtgcaaggccggcaaggtggatgaggccctggagctgttcgacgagatgaaggagaggggcatcaagcccgacgtggtgacatacaccaccctgatcgacggcctgtgcaaggccggcaaagtggacgaggccctggagctgttcgacgagatgaaggagaggggcatcaagcccgacgtggtcacatacaccaccctgatcgacggcctgtgcaaggccggcaaggtggatgaggccctggagctgttcgacgagatgaaggagaggggcatcaagcccgacgtggttacatacaccacactgatcgacggactgtgtaaagccggcgacgtggacgaagccctcgagctgttcaaagagatgcggagcaagggcgtgaagcccaacgtggtcacatacaccaccctgatcgacggcctgtgcaaggccggcaaggtggatgaggccctggagctgttcgacgagatgaaggagaggggcatcaagcccgacgtggtcacatacaccaccctgatcgacggcctgtgcaaggccggcaaagtggacgaggccctggagctgttcgacgagatgaaggagaggggcatcaagcccgacgtggtcacatacaacaccctgatcgacggcctgtgcaagagcggcaagatcgaggaggccctgaagctgttcaaggagatggaggagaagggcatcacccccagcgtggttacatacaccaccctgatcgacggcctgtgcaaggccggcaaagtggacgaggccctggagctgttcgacgagatgaaggagaggggcatcaagcccgacgtggtcacatacaccaccctgatcgacggcctgtgcaaggccggcaaggtggatgaggccctggagctgttcgacgagatgaaggagaggggcatcaagcccgacgtggtgacatacaacaccctgatcgacggcctgtgcaagagcggcaagatcgaggaggccctgaagctgttcaaggagatggaggagaagggcatcacccccagcgtggtcacatacaccacactgatcgacggactgtgtaaagccggcgacgtggacgaagccctcgagctgttcaaagagatgcggagcaagggcgtgaagcccaacgagctgacctacaacaccctgatcagcggcctgggcaaggccggcagagccagagacccccccgtgctcagtagcggctccggcggcagcgggggaggcgggcatcatcaccatcaccacggacgctag

SEQ ID NO: 189 - DNA, 2610 bp, Artificial Sequence
  Synthesized Sequence
atggccggagtgttcacactggaggacttcgtgggcgactggagacagaccgccggctacaacctggaccaggtgctggagcagggcggagtgagcagcctgtttcagaacctgggcgtgagcgtcacccccatccagaggatcgtgctgtccggcgagaatggcctgaagatcgacatccacgtcatcatcccctacgagggcctgagcggcgatcagatgggccagatcgagaagatcttcaaggtggtgtatcccgtcgacgaccaccacttcaaggtgatcctgcattacggcaccctcgtgatcgacggcgtgacccctaacatgatcgactacttcggcaggccctacgagggaatcgccgtgttcgacggaaagaagatcaccgtgaccggcaccctgtggaacggaaacaagatcatcgacgagaggctgatcaaccccgacggctccctgctgttcagggtgaccatcaatggcgtgaccggctggagactgtgcgagagaatcctggccggaggcggaggaagcctcgtgcccagaggatccggcggaggcggctccagccggctccatatgggaaactccgtggtcacatacaccaccctgatcgacggcctgtgcaaggccggcaaggtggacgaagccctggagctgttcgacgagatgaaggagaggggcatcaagcccgacgtggtcacatacaccaccctgatcgacggcctgtgcaaggccggcaaggtggatgaggccctggagctgttcgacgagatgaaggagaggggcatcaagcccgacgtggtcacatacaacaccctgatcgacggcctgtgcaagagcggcaagatcgaggaggccctgaagctgttcaaggagatggaggagaagggcatcacccccagcgtggtcacatacaccaccctgatcgacggcctgtgcaaggccggcaaggtggacgaagccctggagctgttcgacgagatgaaggagaggggcatcaagcccgacgtggtcacatacaccaccctgatcgacggcctgtgcaaggccggcaaggtggacgaagccctggagctgttcgacgagatgaaggagaggggcatcaagcccgacgtggtcacatacaccaccctgatcgacggcctgtgcaaggccggcaaggtggatgaggccctggagctgttcgacgagatgaaggagaggggcatcaagcccgacgtggtcacatacaccaccctgatcgacggcctgtgcaaggccggcaaagtggacgaggccctggagctgttcgacgagatgaaggagaggggcatcaagcccgacgtggtcacatacaacaccctgatcgacggcctgtgcaagagcggcaagatcgaggaggccctgaagctgttcaaggagatggaggagaagggcatcacccccagcgtggtcacatacaccacactgatcgacggactgtgtaaagccggcgacgtggacgaagccctcgagctgttcaaagagatgcggagcaagggcgtgaagcccaacgtggtcacatacaacaccctgatcgacggcctgtgcaagagcggcaagatcgaggaggccctgaagctgttcaaggagatggaggagaagggcatcacccccagcgtggtcacatacaacaccctgatcgacggcctgtgcaaggccggcagactggatgaggccgaggagctgctggaggagatggaggagaagggcatcaagcccgacgtggtcacatacaccaccctgatcgacggcctgtgcaaggccggcaaggtggacgaagccctggagctgttcgacgagatgaaggagaggggcatcaagcccgacgtggtcacatacaacaccctgatcgacggcctgtgcaaggccggcagactggacgaagccgaggagctgctggaggagatggaggagaagggcatcaagcccgacgtggtcacatacaccaccctgatcgacggcctgtgcaaggccggcaaggtggatgaggccctggagctgttcgacgagatgaaggagaggggcatcaagcccgacgtggtcacatacaacaccctgatcgacggcctgtgcaagagcggcaagatcgaggaggccctgaagctgttcaaggagatggaggagaagggcatcacccccagcgtggtcacatacaccaccctgatcgacggcctgtgcaaggccggcaaggtggacgaagccctggagctgttcgacgagatgaaggagaggggcatcaagcccgacgtggtcacatacaacaccctgatcgacggcctgtgcaaggccggcagactggacgaagccgaggagctgctggaggagatggaggagaagggcatcaagcccgacgtggtcacatacaccaccctgatcgacggcctgtgcaaggccggcaaggtggatgaggccctggagctgttcgacgagatgaaggagaggggcatcaagcccgacgagctgacctacaacaccctgatcagcggcctgggcaaggccggcagagccagagacccccccgtgctcagtagcggctccggcggcagcgggggaggcgggcatcatcaccatcaccacggacgctag

SEQ ID NO: 190 - DNA, 2610 bp, Artificial Sequence
  Synthesized Sequence
atggccggagtgttcacactggaggacttcgtgggcgactggagacagaccgccggctacaacctggaccaggtgctggagcagggcggagtgagcagcctgtttcagaacctgggcgtgagcgtcacccccatccagaggatcgtgctgtccggcgagaatggcctgaagatcgacatccacgtcatcatcccctacgagggcctgagcggcgatcagatgggccagatcgagaagatcttcaaggtggtgtatcccgtcgacgaccaccacttcaaggtgatcctgcattacggcaccctcgtgatcgacggcgtgacccctaacatgatcgactacttcggcaggccctacgagggaatcgccgtgttcgacggaaagaagatcaccgtgaccggcaccctgtggaacggaaacaagatcatcgacgagaggctgatcaaccccgacggctccctgctgttcagggtgaccatcaatggcgtgaccggctggagactgtgcgagagaatcctggccggaggcggaggaagcctcgtgcccagaggatccggcggaggcggctccagccggctccatatgggaaactccgtggtcacatacaacaccctgatcgacggcctgtgcaagagcggcaagatcgaggaggccctgaagctgttcaaggagatggaggagaagggcatcacccccagcgtggtcacatacaccaccctgatcgacggcctgtgcaaggccggcaaggtggatgaggccctggagctgttcgacgagatgaaggagaggggcatcaagcccgacgtggtcacatacaacaccctgatcgacggcctgtgcaaggccggcagactggatgaggccgaggagctgctggaggagatggaggagaagggcatcaagcccgacgtggtcacatacaccaccctgatcgacggcctgtgcaaggccggcaaggtggacgaagccctggagctgttcgacgagatgaaggagaggggcatcaagcccgacgtggtcacatacaacaccctgatcgacggcctgtgcaaggccggcagactggacgaagccgaggagctgctggaggagatggaggagaagggcatcaagcccgacgtggtcacatacaccaccctgatcgacggcctgtgcaaggccggcaaggtggatgaggccctggagctgttcgacgagatgaaggagaggggcatcaagcccgacgtggtcacatacaccaccctgatcgacggcctgtgcaaggccggcaaagtggacgaggccctggagctgttcgacgagatgaaggagaggggcatcaagcccgacgtggtcacatacaccacactgatcgacggactgtgtaaagccggcgacgtggacgaagccctcgagctgttcaaagagatgcggagcaagggcgtgaagcccaacgtggtcacatacaacaccctgatcgacggcctgtgcaaggccggcagactggacgaagccgaggagctgctggaggagatggaggagaagggcatcaagcccgacgtggtcacatacaacaccctgatcgacggcctgtgcaagagcggcaagatcgaggaggccctgaagctgttcaaggagatggaggagaagggcatcacccccagcgtggtcacatacaccaccctgatcgacggcctgtgcaaggccggcaaagtggacgaggccctggagctgttcgacgagatgaaggagaggggcatcaagcccgacgtggtcacatacaccaccctgatcgacggcctgtgcaaggccggcaaggtggacgaagccctggagctgttcgacgagatgaaggagaggggcatcaagcccgacgtggtcacatacaacaccctgatcgacggcctgtgcaagagcggcaagatcgaggaggccctgaagctgttcaaggagatggaggagaagggcatcacccccagcgtggtcacatacaccaccctgatcgacggcctgtgcaaggccggcaaggtggatgaggccctggagctgttcgacgagatgaaggagaggggcatcaagcccgacgtggtcacatacaccaccctgatcgacggcctgtgcaaggccggcaaagtggacgaggccctggagctgttcgacgagatgaaggagaggggcatcaagcccgacgtggtcacatacaacaccctgatcgacggcctgtgcaagagcggcaagatcgaggaggccctgaagctgttcaaggagatggaggagaagggcatcacccccagcgtggtcacatacaacaccctgatcgacggcctgtgcaaggccggcagactggacgaagccgaggagctgctggaggagatggaggagaagggcatcaagcccgacgtggtcacatacaacaccctgatcgacggcctgtgcaagagcggcaagatcgaggaggccctgaagctgttcaaggagatggaggagaagggcatcacccccagcgagctgacctacaacaccctgatcagcggcctgggcaaggccggcagagccagagacccccccgtgctcagtagcggctccggcggcagcgggggaggcgggcatcatcaccatcaccacggacgctag

SEQ ID NO: 191 - DNA, 2610 bp, Artificial Sequence
  Synthesized Sequence
atggccggagtgttcacactggaggacttcgtgggcgactggagacagaccgccggctacaacctggaccaggtgctggagcagggcggagtgagcagcctgtttcagaacctgggcgtgagcgtcacccccatccagaggatcgtgctgtccggcgagaatggcctgaagatcgacatccacgtcatcatcccctacgagggcctgagcggcgatcagatgggccagatcgagaagatcttcaaggtggtgtatcccgtcgacgaccaccacttcaaggtgatcctgcattacggcaccctcgtgatcgacggcgtgacccctaacatgatcgactacttcggcaggccctacgagggaatcgccgtgttcgacggaaagaagatcaccgtgaccggcaccctgtggaacggaaacaagatcatcgacgagaggctgatcaaccccgacggctccctgctgttcagggtgaccatcaatggcgtgaccggctggagactgtgcgagagaatcctggccggaggcggaggaagcctcgtgcccagaggatccggcggaggcggctccagccggctccatatgggaaactccgtggtcacatacaacaccctgatcgacggcctgtgcaaggccggcagactggacgaagccgaggagctgctggaggagatggaggagaagggcatcaagcccgacgtggtcacatacaacaccctgatcgacggcctgtgcaagagcggcaagatcgaggaggccctgaagctgttcaaggagatggaggagaagggcatcacccccagcgtggtcacatacaacaccctgatcgacggcctgtgcaagagcggcaagatcgaggaggccctgaagctgttcaaggagatggaggagaagggcatcacccccagcgtggtcacatacaccacactgatcgacggactgtgtaaagccggcgacgtggacgaagccctcgagctgttcaaagagatgcggagcaagggcgtgaagcccaacgtggtcacatacaccaccctgatcgacggcctgtgcaaggccggcaaggtggacgaagccctggagctgttcgacgagatgaaggagaggggcatcaagcccgacgtggtcacatacaccaccctgatcgacggcctgtgcaaggccggcaaggtggatgaggccctggagctgttcgacgagatgaaggagaggggcatcaagcccgacgtggtcacatacaacaccctgatcgacggcctgtgcaagagcggcaagatcgaggaggccctgaagctgttcaaggagatggaggagaagggcatcacccccagcgtggtcacatacaacaccctgatcgacggcctgtgcaaggccggcagactggacgaggccgaagagctgctggaggagatggaggagaagggcatcaagcccgacgtggtcacatacaccaccctgatcgacggcctgtgcaaggccggcaaggtggacgaagccctggagctgttcgacgagatgaaggagaggggcatcaagcccgacgtggtcacatacaacaccctgatcgacggcctgtgcaaggccggcagactggatgaggccgaggagctgctggaggagatggaggagaagggcatcaagcccgacgtggtcacatacaccaccctgatcgacggcctgtgcaaggccggcaaagtggacgaggccctggagctgttcgacgagatgaaggagaggggcatcaagcccgacgtggtcacatacaacaccctgatcgacggcctgtgcaagagcggcaagatcgaggaggccctgaagctgttcaaggagatggaggagaagggcatcacccccagcgtggtcacatacaacaccctgatcgacggcctgtgcaaggccggcagactggacgaagccgaggagctgctggaggagatggaggagaagggcatcaagcccgacgtggtcacatacaccacactgatcgacggactgtgtaaagccggcgacgtggacgaagccctcgagctgttcaaagagatgcggagcaagggcgtgaagcccaacgtggtcacatacaacaccctgatcgacggcctgtgcaaggccggcagactggatgaggccgaggagctgctggaggagatggaggagaagggcatcaagcccgacgtggtcacatacaacaccctgatcgacggcctgtgcaagagcggcaagatcgaggaggccctgaagctgttcaaggagatggaggagaagggcatcacccccagcgtggtcacatacaacaccctgatcgacggcctgtgcaagagcggcaagatcgaggaggccctgaagctgttcaaggagatggaggagaagggcatcacccccagcgtggtcacatacaacaccctgatcgacggcctgtgcaagagcggcaagatcgaggaggccctgaagctgttcaaggagatggaggagaagggcatcacccccagcgagctgacctacaacaccctgatcagcggcctgggcaaggccggcagagccagagacccccccgtgctcagtagcggctccggcggcagcgggggaggcgggcatcatcaccatcaccacggacgctag

SEQ ID NO: 192 - DNA, 2610 bp, Artificial Sequence
  Synthesized Sequence
atggccggagtgttcacactggaggacttcgtgggcgactggagacagaccgccggctacaacctggaccaggtgctggagcagggcggagtgagcagcctgtttcagaacctgggcgtgagcgtcacccccatccagaggatcgtgctgtccggcgagaatggcctgaagatcgacatccacgtcatcatcccctacgagggcctgagcggcgatcagatgggccagatcgagaagatcttcaaggtggtgtatcccgtcgacgaccaccacttcaaggtgatcctgcattacggcaccctcgtgatcgacggcgtgacccctaacatgatcgactacttcggcaggccctacgagggaatcgccgtgttcgacggaaagaagatcaccgtgaccggcaccctgtggaacggaaacaagatcatcgacgagaggctgatcaaccccgacggctccctgctgttcagggtgaccatcaatggcgtgaccggctggagactgtgcgagagaatcctggccggaggcggaggaagcctcgtgcccagaggatccggcggaggcggctccagccggctccatatgggaaactccgtggtcacatacaacaccctgatcgacggcctgtgcaaggccggcagactggacgaagccgaggagctgctggaggagatggaggagaagggcatcaagcccgacgtggtcacatacaacaccctgatcgacggcctgtgcaagagcggcaagatcgaggaggccctgaagctgttcaaggagatggaggagaagggcatcacccccagcgtggtcacatacaccacactgatcgacggactgtgtaaagccggcgacgtggacgaagccctcgagctgttcaaagagatgcggagcaagggcgtgaagcccaacgtggtcacatacaccaccctgatcgacggcctgtgcaaggccggcaaggtggacgaagccctggagctgttcgacgagatgaaggagaggggcatcaagcccgacgtggtcacatacaccaccctgatcgacggcctgtgcaaggccggcaaggtggacgaagccctggagctgttcgacgagatgaaggagaggggcatcaagcccgacgtggtcacatacaccacactgatcgacggactgtgtaaagccggcgacgtggacgaagccctcgagctgttcaaagagatgcggagcaagggcgtgaagcccaacgtggtcacatacaacaccctgatcgacggcctgtgcaaggccggcagactggatgaggccgaggagctgctggaggagatggaggagaagggcatcaagcccgacgtggtcacatacaacaccctgatcgacggcctgtgcaaggccggcagactggacgaggccgaagagctgctggaggagatggaggagaagggcatcaagcccgacgtggtcacatacaacaccctgatcgacggcctgtgcaaggccggcagactggacgaagccgaggagctgctggaggagatggaggagaagggcatcaagcccgacgtggtcacatacaccacactgatcgacggactgtgtaaagccggcgacgtggacgaagccctcgagctgttcaaagagatgcggagcaagggcgtgaagcccaacgtggtcacatacaccacactgatcgacggactgtgtaaagccggcgacgtggacgaagccctcgagctgttcaaagagatgcggagcaagggcgtgaagcccaacgtggtcacatacaccacactgatcgacggactgtgtaaagccggcgacgtggacgaagccctcgagctgttcaaagagatgcggagcaagggcgtgaagcccaacgtggtcacatacaccacactgatcgacggactgtgtaaagccggcgacgtggacgaagccctcgagctgttcaaagagatgcggagcaagggcgtgaagcccaacgtggtcacatacaccacactgatcgacggactgtgtaaagccggcgacgtggacgaagccctcgagctgttcaaagagatgcggagcaagggcgtgaagcccaacgtggtcacatacaacaccctgatcgacggcctgtgcaagagcggcaagatcgaggaggccctgaagctgttcaaggagatggaggagaagggcatcacccccagcgtggtcacatacaacaccctgatcgacggcctgtgcaaggccggcagactggacgaggccgaagagctgctggaggagatggaggagaagggcatcaagcccgacgtggtcacatacaccaccctgatcgacggcctgtgcaaggccggcaaggtggacgaagccctggagctgttcgacgagatgaaggagaggggcatcaagcccgacgtggtcacatacaccaccctgatcgacggcctgtgcaaggccggcaaggtggatgaggccctggagctgttcgacgagatgaaggagaggggcatcaagcccgacgagctgacctacaacaccctgatcagcggcctgggcaaggccggcagagccagagacccccccgtgctcagtagcggctccggcggcagcgggggaggcgggcatcatcaccatcaccacggacgctag

SEQ ID NO: 193 - DNA, 2610 bp, Artificial Sequence
  Synthesized Sequence
atggccggagtgttcacactggaggacttcgtgggcgactggagacagaccgccggctacaacctggaccaggtgctggagcagggcggagtgagcagcctgtttcagaacctgggcgtgagcgtcacccccatccagaggatcgtgctgtccggcgagaatggcctgaagatcgacatccacgtcatcatcccctacgagggcctgagcggcgatcagatgggccagatcgagaagatcttcaaggtggtgtatcccgtcgacgaccaccacttcaaggtgatcctgcattacggcaccctcgtgatcgacggcgtgacccctaacatgatcgactacttcggcaggccctacgagggaatcgccgtgttcgacggaaagaagatcaccgtgaccggcaccctgtggaacggaaacaagatcatcgacgagaggctgatcaaccccgacggctccctgctgttcagggtgaccatcaatggcgtgaccggctggagactgtgcgagagaatcctggccggaggcggaggaagcctcgtgcccagaggatccggcggaggcggctccagccggctccatatgggaaactccgtggtcacatacaacaccctgatcgacggcctgtgcaaggccggcagactggatgaggccgaggagctgctggaggagatggaggagaagggcatcaagcccgacgtggtcacatacaacaccctgatcgacggcctgtgcaagagcggcaagatcgaggaggccctgaagctgttcaaggagatggaggagaagggcatcacccccagcgtggtgacatacaacaccctgatcgacggcctgtgcaaggccggcagactggatgaggccgaggagctgctggaggagatggaggagaagggcatcaagcccgacgtggtcacatacaccacactgatcgacggactgtgtaaagccggcgacgtggacgaagccctcgagctgttcaaagagatgcggagcaagggcgtgaagcccaacgtggttacatacaccaccctgatcgacggcctgtgcaaggccggcaaagtggacgaggccctggagctgttcgacgagatgaaggagaggggcatcaagcccgacgtggtcacatacaccacactgatcgacggactgtgtaaagccggcgacgtggacgaagccctcgagctgttcaaagagatgcggagcaagggcgtgaagcccaacgtggttacatacaccacactgatcgacggactgtgtaaagccggcgacgtggacgaagccctcgagctgttcaaagagatgcggagcaagggcgtgaagcccaacgtggtcacatacaacaccctgatcgacggcctgtgcaaggccggcagactggatgaggccgaggagctgctggaggagatggaggagaagggcatcaagcccgacgtggtgacatacaacaccctgatcgacggcctgtgcaagagcggcaagatcgaggaggccctgaagctgttcaaggagatggaggagaagggcatcacccccagcgtggtcacatacaacaccctgatcgacggcctgtgcaagagcggcaagatcgaggaggccctgaagctgttcaaggagatggaggagaagggcatcacccccagcgtggttacatacaacaccctgatcgacggcctgtgcaaggccggcagactggatgaggccgaggagctgctggaggagatggaggagaagggcatcaagcccgacgtggtcacatacaccacactgatcgacggactgtgtaaagccggcgacgtggacgaagccctcgagctgttcaaagagatgcggagcaagggcgtgaagcccaacgtggtcacatacaccacactgatcgacggactgtgtaaagccggcgacgtggacgaagccctcgagctgttcaaagagatgcggagcaagggcgtgaagcccaacgtggtcacatacaccacactgatcgacggactgtgtaaagccggcgacgtggacgaagccctcgagctgttcaaagagatgcggagcaagggcgtgaagcccaacgtggttacatacaccaccctgatcgacggcctgtgcaaggccggcaaagtggacgaggccctggagctgttcgacgagatgaaggagaggggcatcaagcccgacgtggtcacatacaccaccctgatcgacggcctgtgcaaggccggcaaggtggatgaggccctggagctgttcgacgagatgaaggagaggggcatcaagcccgacgtggtgacatacaacaccctgatcgacggcctgtgcaagagcggcaagatcgaggaggccctgaagctgttcaaggagatggaggagaagggcatcacccccagcgtggtcacatacaccacactgatcgacggactgtgtaaagccggcgacgtggacgaagccctcgagctgttcaaagagatgcggagcaagggcgtgaagcccaacgagctgacctacaacaccctgatcagcggcctgggcaaggccggcagagccagagacccccccgtgctcagtagcggctccggcggcagcgggggaggcgggcatcatcaccatcaccacggacgctag

SEQ ID NO: 194 - DNA, 2610 bp, Artificial Sequence
  Synthesized Sequence
atggccggagtgttcacactggaggacttcgtgggcgactggagacagaccgccggctacaacctggaccaggtgctggagcagggcggagtgagcagcctgtttcagaacctgggcgtgagcgtcacccccatccagaggatcgtgctgtccggcgagaatggcctgaagatcgacatccacgtcatcatcccctacgagggcctgagcggcgatcagatgggccagatcgagaagatcttcaaggtggtgtatcccgtcgacgaccaccacttcaaggtgatcctgcattacggcaccctcgtgatcgacggcgtgacccctaacatgatcgactacttcggcaggccctacgagggaatcgccgtgttcgacggaaagaagatcaccgtgaccggcaccctgtggaacggaaacaagatcatcgacgagaggctgatcaaccccgacggctccctgctgttcagggtgaccatcaatggcgtgaccggctggagactgtgcgagagaatcctggccggaggcggaggaagcctcgtgcccagaggatccggcggaggcggctccagccggctccatatgggaaactccgtggtcacatacaacaccctgatcgacggcctgtgcaaggccggcagactggacgaagccgaggagctgctggaggagatggaggagaagggcatcaagcccgacgtggtcacatacaacaccctgatcgacggcctgtgcaaggccggcagactggatgaggccgaggagctgctggaggagatggaggagaagggcatcaagcccgacgtggtcacatacaccaccctgatcgacggcctgtgcaaggccggcaaagtggacgaggccctggagctgttcgacgagatgaaggagaggggcatcaagcccgacgtggtcacatacaacaccctgatcgacggcctgtgcaaggccggcagactggacgaggccgaagagctgctggaggagatggaggagaagggcatcaagcccgacgtggtcacatacaccaccctgatcgacggcctgtgcaaggccggcaaggtggacgaagccctggagctgttcgacgagatgaaggagaggggcatcaagcccgacgtggtcacatacaccaccctgatcgacggcctgtgcaaggccggcaaggtggatgaggccctggagctgttcgacgagatgaaggagaggggcatcaagcccgacgtggtcacatacaacaccctgatcgacggcctgtgcaagagcggcaagatcgaggaggccctgaagctgttcaaggagatggaggagaagggcatcacccccagcgtggtcacatacaacaccctgatcgacggcctgtgcaagagcggcaagatcgaggaggccctgaagctgttcaaggagatggaggagaagggcatcacccccagcgtggtcacatacaacaccctgatcgacggcctgtgcaaggccggcagactggacgaagccgaggagctgctggaggagatggaggagaagggcatcaagcccgacgtggtcacatacaacaccctgatcgacggcctgtgcaaggccggcagactggatgaggccgaggagctgctggaggagatggaggagaagggcatcaagcccgacgtggtcacatacaacaccctgatcgacggcctgtgcaaggccggcagactggatgaggccgaggagctgctggaggagatggaggagaagggcatcaagcccgacgtggtcacatacaacaccctgatcgacggcctgtgcaaggccggcagactggacgaggccgaagagctgctggaggagatggaggagaagggcatcaagcccgacgtggtcacatacaacaccctgatcgacggcctgtgcaaggccggcagactggacgaagccgaggagctgctggaggagatggaggagaagggcatcaagcccgacgtggtcacatacaacaccctgatcgacggcctgtgcaagagcggcaagatcgaggaggccctgaagctgttcaaggagatggaggagaagggcatcacccccagcgtggtcacatacaacaccctgatcgacggcctgtgcaaggccggcagactggatgaggccgaggagctgctggaggagatggaggagaagggcatcaagcccgacgtggtcacatacaacaccctgatcgacggcctgtgcaagagcggcaagatcgaggaggccctgaagctgttcaaggagatggaggagaagggcatcacccccagcgtggtcacatacaacaccctgatcgacggcctgtgcaagagcggcaagatcgaggaggccctgaagctgttcaaggagatggaggagaagggcatcacccccagcgtggtcacatacaacaccctgatcgacggcctgtgcaaggccggcagactggatgaggccgaggagctgctggaggagatggaggagaagggcatcaagcccgacgagctgacctacaacaccctgatcagcggcctgggcaaggccggcagagccagagacccccccgtgctcagtagcggctccggcggcagcgggggaggcgggcatcatcaccatcaccacggacgctag

SEQ ID NO: 195 - DNA, 2610 bp, Artificial Sequence
  Synthesized Sequence
atggccggagtgttcacactggaggacttcgtgggcgactggagacagaccgccggctacaacctggaccaggtgctggagcagggcggagtgagcagcctgtttcagaacctgggcgtgagcgtcacccccatccagaggatcgtgctgtccggcgagaatggcctgaagatcgacatccacgtcatcatcccctacgagggcctgagcggcgatcagatgggccagatcgagaagatcttcaaggtggtgtatcccgtcgacgaccaccacttcaaggtgatcctgcattacggcaccctcgtgatcgacggcgtgacccctaacatgatcgactacttcggcaggccctacgagggaatcgccgtgttcgacggaaagaagatcaccgtgaccggcaccctgtggaacggaaacaagatcatcgacgagaggctgatcaaccccgacggctccctgctgttcagggtgaccatcaatggcgtgaccggctggagactgtgcgagagaatcctggccggaggcggaggaagcctcgtgcccagaggatccggcggaggcggctccagccggctccatatgggaaactccgtggtcacatacaacaccctgatcgacggcctgtgcaaggccggcagactggacgaagccgaggagctgctggaggagatggaggagaagggcatcaagcccgacgtggtcacatacaccaccctgatcgacggcctgtgcaaggccggcaaggtggatgaggccctggagctgttcgacgagatgaaggagaggggcatcaagcccgacgtggtcacatacaccaccctgatcgacggcctgtgcaaggccggcaaagtggacgaggccctggagctgttcgacgagatgaaggagaggggcatcaagcccgacgtggtcacatacaacaccctgatcgacggcctgtgcaaggccggcagactggacgaggccgaagagctgctggaggagatggaggagaagggcatcaagcccgacgtggtcacatacaccaccctgatcgacggcctgtgcaaggccggcaaggtggacgaagccctggagctgttcgacgagatgaaggagaggggcatcaagcccgacgtggtcacatacaacaccctgatcgacggcctgtgcaaggccggcagactggatgaggccgaggagctgctggaggagatggaggagaagggcatcaagcccgacgtggtcacatacaccacactgatcgacggactgtgtaaagccggcgacgtggacgaagccctcgagctgttcaaagagatgcggagcaagggcgtgaagcccaacgtggtcacatacaacaccctgatcgacggcctgtgcaaggccggcagactggacgaggccgaagagctgctggaggagatggaggagaagggcatcaagcccgacgtggtcacatacaacaccctgatcgacggcctgtgcaagagcggcaagatcgaggaggccctgaagctgttcaaggagatggaggagaagggcatcacccccagcgtggtcacatacaacaccctgatcgacggcctgtgcaaggccggcagactggatgaggccgaggagctgctggaggagatggaggagaagggcatcaagcccgacgtggtcacatacaacaccctgatcgacggcctgtgcaaggccggcagactggatgaggccgaggagctgctggaggagatggaggagaagggcatcaagcccgacgtggtcacatacaccaccctgatcgacggcctgtgcaaggccggcaaggtggacgaagccctggagctgttcgacgagatgaaggagaggggcatcaagcccgacgtggtcacatacaacaccctgatcgacggcctgtgcaaggccggcagactggacgaagccgaggagctgctggaggagatggaggagaagggcatcaagcccgacgtggtcacatacaacaccctgatcgacggcctgtgcaagagcggcaagatcgaggaggccctgaagctgttcaaggagatggaggagaagggcatcacccccagcgtggtcacatacaacaccctgatcgacggcctgtgcaaggccggcagactggatgaggccgaggagctgctggaggagatggaggagaagggcatcaagcccgacgtggtcacatacaacaccctgatcgacggcctgtgcaaggccggcagactggacgaggccgaagagctgctggaggagatggaggagaagggcatcaagcccgacgtggtcacatacaacaccctgatcgacggcctgtgcaaggccggcagactggacgaagccgaggagctgctggaggagatggaggagaagggcatcaagcccgacgtggtcacatacaccacactgatcgacggactgtgtaaagccggcgacgtggacgaagccctcgagctgttcaaagagatgcggagcaagggcgtgaagcccaacgagctgacctacaacaccctgatcagcggcctgggcaaggccggcagagccagagacccccccgtgctcagtagcggctccggcggcagcgggggaggcgggcatcatcaccatcaccacggacgctag

SEQ ID NO: 196 - DNA, 2610 bp, Artificial Sequence
  Synthesized Sequence
atggccggagtgttcacactggaggacttcgtgggcgactggagacagaccgccggctacaacctggaccaggtgctggagcagggcggagtgagcagcctgtttcagaacctgggcgtgagcgtcacccccatccagaggatcgtgctgtccggcgagaatggcctgaagatcgacatccacgtcatcatcccctacgagggcctgagcggcgatcagatgggccagatcgagaagatcttcaaggtggtgtatcccgtcgacgaccaccacttcaaggtgatcctgcattacggcaccctcgtgatcgacggcgtgacccctaacatgatcgactacttcggcaggccctacgagggaatcgccgtgttcgacggaaagaagatcaccgtgaccggcaccctgtggaacggaaacaagatcatcgacgagaggctgatcaaccccgacggctccctgctgttcagggtgaccatcaatggcgtgaccggctggagactgtgcgagagaatcctggccggaggcggaggaagcctcgtgcccagaggatccggcggaggcggctccagccggctccatatgggaaactccgtggtcacatacaccaccctgatcgacggcctgtgcaaggccggcaaggtggacgaagccctggagctgttcgacgagatgaaggagaggggcatcaagcccgacgtggtcacatacaccacactgatcgacggactgtgtaaagccggcgacgtggacgaagccctcgagctgttcaaagagatgcggagcaagggcgtgaagcccaacgtggtcacatacaacaccctgatcgacggcctgtgcaaggccggcagactggatgaggccgaggagctgctggaggagatggaggagaagggcatcaagcccgacgtggtcacatacaccacactgatcgacggactgtgtaaagccggcgacgtggacgaagccctcgagctgttcaaagagatgcggagcaagggcgtgaagcccaacgtggtcacatacaacaccctgatcgacggcctgtgcaaggccggcagactggacgaagccgaggagctgctggaggagatggaggagaagggcatcaagcccgacgtggtcacatacaacaccctgatcgacggcctgtgcaagagcggcaagatcgaggaggccctgaagctgttcaaggagatggaggagaagggcatcacccccagcgtggtcacatacaccaccctgatcgacggcctgtgcaaggccggcaaagtggacgaggccctggagctgttcgacgagatgaaggagaggggcatcaagcccgacgtggtcacatacaacaccctgatcgacggcctgtgcaagagcggcaagatcgaggaggccctgaagctgttcaaggagatggaggagaagggcatcacccccagcgtggtcacatacaacaccctgatcgacggcctgtgcaagagcggcaagatcgaggaggccctgaagctgttcaaggagatggaggagaagggcatcacccccagcgtggtcacatacaccaccctgatcgacggcctgtgcaaggccggcaaggtggatgaggccctggagctgttcgacgagatgaaggagaggggcatcaagcccgacgtggtcacatacaacaccctgatcgacggcctgtgcaagagcggcaagatcgaggaggccctgaagctgttcaaggagatggaggagaagggcatcacccccagcgtggtcacatacaccaccctgatcgacggcctgtgcaaggccggcaaggtggacgaagccctggagctgttcgacgagatgaaggagaggggcatcaagcccgacgtggtcacatacaacaccctgatcgacggcctgtgcaagagcggcaagatcgaggaggccctgaagctgttcaaggagatggaggagaagggcatcacccccagcgtggtcacatacaacaccctgatcgacggcctgtgcaaggccggcagactggatgaggccgaggagctgctggaggagatggaggagaagggcatcaagcccgacgtggtcacatacaacaccctgatcgacggcctgtgcaagagcggcaagatcgaggaggccctgaagctgttcaaggagatggaggagaagggcatcacccccagcgtggtcacatacaccaccctgatcgacggcctgtgcaaggccggcaaggtggacgaagccctggagctgttcgacgagatgaaggagaggggcatcaagcccgacgtggtcacatacaacaccctgatcgacggcctgtgcaaggccggcagactggacgaagccgaggagctgctggaggagatggaggagaagggcatcaagcccgacgtggtcacatacaacaccctgatcgacggcctgtgcaagagcggcaagatcgaggaggccctgaagctgttcaaggagatggaggagaagggcatcacccccagcgagctgacctacaacaccctgatcagcggcctgggcaaggccggcagagccagagacccccccgtgctcagtagcggctccggcggcagcgggggaggcgggcatcatcaccatcaccacggacgctag

SEQ ID NO: 197 - DNA, 2610 bp, Artificial Sequence
  Synthesized Sequence
atggccggagtgttcacactggaggacttcgtgggcgactggagacagaccgccggctacaacctggaccaggtgctggagcagggcggagtgagcagcctgtttcagaacctgggcgtgagcgtcacccccatccagaggatcgtgctgtccggcgagaatggcctgaagatcgacatccacgtcatcatcccctacgagggcctgagcggcgatcagatgggccagatcgagaagatcttcaaggtggtgtatcccgtcgacgaccaccacttcaaggtgatcctgcattacggcaccctcgtgatcgacggcgtgacccctaacatgatcgactacttcggcaggccctacgagggaatcgccgtgttcgacggaaagaagatcaccgtgaccggcaccctgtggaacggaaacaagatcatcgacgagaggctgatcaaccccgacggctccctgctgttcagggtgaccatcaatggcgtgaccggctggagactgtgcgagagaatcctggccggaggcggaggaagcctcgtgcccagaggatccggcggaggcggctccagccggctccatatgggaaactccgtggtcacatacaacaccctgatcgacggcctgtgcaagagcggcaagatcgaggaggccctgaagctgttcaaggagatggaggagaagggcatcacccccagcgtggtcacatacaccaccctgatcgacggcctgtgcaaggccggcaaggtggatgaggccctggagctgttcgacgagatgaaggagaggggcatcaagcccgacgtggtgacatacaccaccctgatcgacggcctgtgcaaggccggcaaagtggacgaggccctggagctgttcgacgagatgaaggagaggggcatcaagcccgacgtggtcacatacaacaccctgatcgacggcctgtgcaagagcggcaagatcgaggaggccctgaagctgttcaaggagatggaggagaagggcatcacccccagcgtggttacatacaccaccctgatcgacggcctgtgcaaggccggcaaagtggacgaggccctggagctgttcgacgagatgaaggagaggggcatcaagcccgacgtggtcacatacaccaccctgatcgacggcctgtgcaaggccggcaaggtggatgaggccctggagctgttcgacgagatgaaggagaggggcatcaagcccgacgtggttacatacaacaccctgatcgacggcctgtgcaagagcggcaagatcgaggaggccctgaagctgttcaaggagatggaggagaagggcatcacccccagcgtggtcacatacaccaccctgatcgacggcctgtgcaaggccggcaaggtggatgaggccctggagctgttcgacgagatgaaggagaggggcatcaagcccgacgtggtgacatacaccaccctgatcgacggcctgtgcaaggccggcaaagtggacgaggccctggagctgttcgacgagatgaaggagaggggcatcaagcccgacgtggtcacatacaacaccctgatcgacggcctgtgcaagagcggcaagatcgaggaggccctgaagctgttcaaggagatggaggagaagggcatcacccccagcgtggttacatacaccaccctgatcgacggcctgtgcaaggccggcaaagtggacgaggccctggagctgttcgacgagatgaaggagaggggcatcaagcccgacgtggtcacatacaccaccctgatcgacggcctgtgcaaggccggcaaggtggatgaggccctggagctgttcgacgagatgaaggagaggggcatcaagcccgacgtggtcacatacaacaccctgatcgacggcctgtgcaagagcggcaagatcgaggaggccctgaagctgttcaaggagatggaggagaagggcatcacccccagcgtggtcacatacaccaccctgatcgacggcctgtgcaaggccggcaaggtggatgaggccctggagctgttcgacgagatgaaggagaggggcatcaagcccgacgtggttacatacaccaccctgatcgacggcctgtgcaaggccggcaaagtggacgaggccctggagctgttcgacgagatgaaggagaggggcatcaagcccgacgtggtcacatacaacaccctgatcgacggcctgtgcaagagcggcaagatcgaggaggccctgaagctgttcaaggagatggaggagaagggcatcacccccagcgtggtgacatacaccaccctgatcgacggcctgtgcaaggccggcaaagtggacgaggccctggagctgttcgacgagatgaaggagaggggcatcaagcccgacgtggtcacatacaccaccctgatcgacggcctgtgcaaggccggcaaggtggatgaggccctggagctgttcgacgagatgaaggagaggggcatcaagcccgacgagctgacctacaacaccctgatcagcggcctgggcaaggccggcagagccagagacccccccgtgctcagtagcggctccggcggcagcgggggaggcgggcatcatcaccatcaccacggacgctag

SEQ ID NO: 198 - DNA, 2610 bp, Artificial Sequence
  Synthesized Sequence
atggccggagtgttcacactggaggacttcgtgggcgactggagacagaccgccggctacaacctggaccaggtgctggagcagggcggagtgagcagcctgtttcagaacctgggcgtgagcgtcacccccatccagaggatcgtgctgtccggcgagaatggcctgaagatcgacatccacgtcatcatcccctacgagggcctgagcggcgatcagatgggccagatcgagaagatcttcaaggtggtgtatcccgtcgacgaccaccacttcaaggtgatcctgcattacggcaccctcgtgatcgacggcgtgacccctaacatgatcgactacttcggcaggccctacgagggaatcgccgtgttcgacggaaagaagatcaccgtgaccggcaccctgtggaacggaaacaagatcatcgacgagaggctgatcaaccccgacggctccctgctgttcagggtgaccatcaatggcgtgaccggctggagactgtgcgagagaatcctggccggaggcggaggaagcctcgtgcccagaggatccggcggaggcggctccagccggctccatatgggaaactccgtggtcacatacaccacactgatcgacggactgtgtaaagccggcgacgtggacgaagccctcgagctgttcaaagagatgcggagcaagggcgtgaagcccaacgtggtcacatacaacaccctgatcgacggcctgtgcaagagcggcaagatcgaggaggccctgaagctgttcaaggagatggaggagaagggcatcacccccagcgtggtcacatacaccacactgatcgacggactgtgtaaagccggcgacgtggacgaagccctcgagctgttcaaagagatgcggagcaagggcgtgaagcccaacgtggtcacatacaccacactgatcgacggactgtgtaaagccggcgacgtggacgaagccctcgagctgttcaaagagatgcggagcaagggcgtgaagcccaacgtggtcacatacaacaccctgatcgacggcctgtgcaagagcggcaagatcgaggaggccctgaagctgttcaaggagatggaggagaagggcatcacccccagcgtggtcacatacaccaccctgatcgacggcctgtgcaaggccggcaaggtggatgaggccctggagctgttcgacgagatgaaggagaggggcatcaagcccgacgtggtcacatacaccaccctgatcgacggcctgtgcaaggccggcaaagtggacgaggccctggagctgttcgacgagatgaaggagaggggcatcaagcccgacgtggtcacatacaacaccctgatcgacggcctgtgcaagagcggcaagatcgaggaggccctgaagctgttcaaggagatggaggagaagggcatcacccccagcgtggtcacatacaacaccctgatcgacggcctgtgcaaggccggcagactggacgaagccgaggagctgctggaggagatggaggagaagggcatcaagcccgacgtggtcacatacaacaccctgatcgacggcctgtgcaagagcggcaagatcgaggaggccctgaagctgttcaaggagatggaggagaagggcatcacccccagcgtggtcacatacaacaccctgatcgacggcctgtgcaagagcggcaagatcgaggaggccctgaagctgttcaaggagatggaggagaagggcatcacccccagcgtggtcacatacaccaccctgatcgacggcctgtgcaaggccggcaaggtggacgaagccctggagctgttcgacgagatgaaggagaggggcatcaagcccgacgtggtcacatacaccaccctgatcgacggcctgtgcaaggccggcaaggtggacgaagccctggagctgttcgacgagatgaaggagaggggcatcaagcccgacgtggtcacatacaacaccctgatcgacggcctgtgcaagagcggcaagatcgaggaggccctgaagctgttcaaggagatggaggagaagggcatcacccccagcgtggtcacatacaccacactgatcgacggactgtgtaaagccggcgacgtggacgaagccctcgagctgttcaaagagatgcggagcaagggcgtgaagcccaacgtggtcacatacaacaccctgatcgacggcctgtgcaaggccggcagactggacgaggccgaagagctgctggaggagatggaggagaagggcatcaagcccgacgtggtcacatacaccaccctgatcgacggcctgtgcaaggccggcaaggtggacgaagccctggagctgttcgacgagatgaaggagaggggcatcaagcccgacgtggtcacatacaacaccctgatcgacggcctgtgcaaggccggcagactggatgaggccgaggagctgctggaggagatggaggagaagggcatcaagcccgacgagctgacctacaacaccctgatcagcggcctgggcaaggccggcagagccagagacccccccgtgctcagtagcggctccggcggcagcgggggaggcgggcatcatcaccatcaccacggacgctag

SEQ ID NO: 199 - DNA, 2610 bp, Artificial Sequence
  Synthesized Sequence
atggccggagtgttcacactggaggacttcgtgggcgactggagacagaccgccggctacaacctggaccaggtgctggagcagggcggagtgagcagcctgtttcagaacctgggcgtgagcgtcacccccatccagaggatcgtgctgtccggcgagaatggcctgaagatcgacatccacgtcatcatcccctacgagggcctgagcggcgatcagatgggccagatcgagaagatcttcaaggtggtgtatcccgtcgacgaccaccacttcaaggtgatcctgcattacggcaccctcgtgatcgacggcgtgacccctaacatgatcgactacttcggcaggccctacgagggaatcgccgtgttcgacggaaagaagatcaccgtgaccggcaccctgtggaacggaaacaagatcatcgacgagaggctgatcaaccccgacggctccctgctgttcagggtgaccatcaatggcgtgaccggctggagactgtgcgagagaatcctggccggaggcggaggaagcctcgtgcccagaggatccggcggaggcggctccagccggctccatatgggaaactccgtggtcacatacaccaccctgatcgacggcctgtgcaaggccggcaaggtggatgaggccctggagctgttcgacgagatgaaggagaggggcatcaagcccgacgtggtcacatacaccaccctgatcgacggcctgtgcaaggccggcaaggtggatgaggccctggagctgttcgacgagatgaaggagaggggcatcaagcccgacgtggtgacatacaacaccctgatcgacggcctgtgcaagagcggcaagatcgaggaggccctgaagctgttcaaggagatggaggagaagggcatcacccccagcgtggtcacatacaccaccctgatcgacggcctgtgcaaggccggcaaggtggatgaggccctggagctgttcgacgagatgaaggagaggggcatcaagcccgacgtggttacatacaccaccctgatcgacggcctgtgcaaggccggcaaagtggacgaggccctggagctgttcgacgagatgaaggagaggggcatcaagcccgacgtggtcacatacaacaccctgatcgacggcctgtgcaagagcggcaagatcgaggaggccctgaagctgttcaaggagatggaggagaagggcatcacccccagcgtggttacatacaccaccctgatcgacggcctgtgcaaggccggcaaagtggacgaggccctggagctgttcgacgagatgaaggagaggggcatcaagcccgacgtggtcacatacaccaccctgatcgacggcctgtgcaaggccggcaaggtggatgaggccctggagctgttcgacgagatgaaggagaggggcatcaagcccgacgtggtgacatacaacaccctgatcgacggcctgtgcaagagcggcaagatcgaggaggccctgaagctgttcaaggagatggaggagaagggcatcacccccagcgtggtcacatacaccaccctgatcgacggcctgtgcaaggccggcaaggtggatgaggccctggagctgttcgacgagatgaaggagaggggcatcaagcccgacgtggttacatacaccaccctgatcgacggcctgtgcaaggccggcaaagtggacgaggccctggagctgttcgacgagatgaaggagaggggcatcaagcccgacgtggtcacatacaacaccctgatcgacggcctgtgcaagagcggcaagatcgaggaggccctgaagctgttcaaggagatggaggagaagggcatcacccccagcgtggtcacatacaccaccctgatcgacggcctgtgcaaggccggcaaagtggacgaggccctggagctgttcgacgagatgaaggagaggggcatcaagcccgacgtggtcacatacaccaccctgatcgacggcctgtgcaaggccggcaaggtggatgaggccctggagctgttcgacgagatgaaggagaggggcatcaagcccgacgtggttacatacaacaccctgatcgacggcctgtgcaagagcggcaagatcgaggaggccctgaagctgttcaaggagatggaggagaagggcatcacccccagcgtggtcacatacaccaccctgatcgacggcctgtgcaaggccggcaaggtggatgaggccctggagctgttcgacgagatgaaggagaggggcatcaagcccgacgtggtgacatacaccaccctgatcgacggcctgtgcaaggccggcaaagtggacgaggccctggagctgttcgacgagatgaaggagaggggcatcaagcccgacgtggtcacatacaacaccctgatcgacggcctgtgcaagagcggcaagatcgaggaggccctgaagctgttcaaggagatggaggagaagggcatcacccccagcgagctgacctacaacaccctgatcagcggcctgggcaaggccggcagagccagagacccccccgtgctcagtagcggctccggcggcagcgggggaggcgggcatcatcaccatcaccacggacgctag

SEQ ID NO: 200 - DNA, 2610 bp, Artificial Sequence
  Synthesized Sequence
atggccggagtgttcacactggaggacttcgtgggcgactggagacagaccgccggctacaacctggaccaggtgctggagcagggcggagtgagcagcctgtttcagaacctgggcgtgagcgtcacccccatccagaggatcgtgctgtccggcgagaatggcctgaagatcgacatccacgtcatcatcccctacgagggcctgagcggcgatcagatgggccagatcgagaagatcttcaaggtggtgtatcccgtcgacgaccaccacttcaaggtgatcctgcattacggcaccctcgtgatcgacggcgtgacccctaacatgatcgactacttcggcaggccctacgagggaatcgccgtgttcgacggaaagaagatcaccgtgaccggcaccctgtggaacggaaacaagatcatcgacgagaggctgatcaaccccgacggctccctgctgttcagggtgaccatcaatggcgtgaccggctggagactgtgcgagagaatcctggccggaggcggaggaagcctcgtgcccagaggatccggcggaggcggctccagccggctccatatgggaaactccgtggtcacatacaccacactgatcgacggactgtgtaaagccggcgacgtggacgaagccctcgagctgttcaaagagatgcggagcaagggcgtgaagcccaacgtggtcacatacaccaccctgatcgacggcctgtgcaaggccggcaaggtggatgaggccctggagctgttcgacgagatgaaggagaggggcatcaagcccgacgtggtgacatacaacaccctgatcgacggcctgtgcaagagcggcaagatcgaggaggccctgaagctgttcaaggagatggaggagaagggcatcacccccagcgtggtcacatacaacaccctgatcgacggcctgtgcaagagcggcaagatcgaggaggccctgaagctgttcaaggagatggaggagaagggcatcacccccagcgtggttacatacaccacactgatcgacggactgtgtaaagccggcgacgtggacgaagccctcgagctgttcaaagagatgcggagcaagggcgtgaagcccaacgtggtcacatacaacaccctgatcgacggcctgtgcaaggccggcagactggatgaggccgaggagctgctggaggagatggaggagaagggcatcaagcccgacgtggttacatacaccacactgatcgacggactgtgtaaagccggcgacgtggacgaagccctcgagctgttcaaagagatgcggagcaagggcgtgaagcccaacgtggtcacatacaacaccctgatcgacggcctgtgcaagagcggcaagatcgaggaggccctgaagctgttcaaggagatggaggagaagggcatcacccccagcgtggtgacatacaacaccctgatcgacggcctgtgcaaggccggcagactggatgaggccgaggagctgctggaggagatggaggagaagggcatcaagcccgacgtggtcacatacaccacactgatcgacggactgtgtaaagccggcgacgtggacgaagccctcgagctgttcaaagagatgcggagcaagggcgtgaagcccaacgtggttacatacaacaccctgatcgacggcctgtgcaaggccggcagactggatgaggccgaggagctgctggaggagatggaggagaagggcatcaagcccgacgtggtcacatacaacaccctgatcgacggcctgtgcaaggccggcagactggatgaggccgaggagctgctggaggagatggaggagaagggcatcaagcccgacgtggtcacatacaacaccctgatcgacggcctgtgcaaggccggcagactggatgaggccgaggagctgctggaggagatggaggagaagggcatcaagcccgacgtggtcacatacaccacactgatcgacggactgtgtaaagccggcgacgtggacgaagccctcgagctgttcaaagagatgcggagcaagggcgtgaagcccaacgtggttacatacaacaccctgatcgacggcctgtgcaaggccggcagactggatgaggccgaggagctgctggaggagatggaggagaagggcatcaagcccgacgtggtcacatacaccaccctgatcgacggcctgtgcaaggccggcaaggtggatgaggccctggagctgttcgacgagatgaaggagaggggcatcaagcccgacgtggtgacatacaacaccctgatcgacggcctgtgcaaggccggcagactggatgaggccgaggagctgctggaggagatggaggagaagggcatcaagcccgacgtggtcacatacaccaccctgatcgacggcctgtgcaaggccggcaaggtggatgaggccctggagctgttcgacgagatgaaggagaggggcatcaagcccgacgagctgacctacaacaccctgatcagcggcctgggcaaggccggcagagccagagacccccccgtgctcagtagcggctccggcggcagcgggggaggcgggcatcatcaccatcaccacggacgctag

SEQ ID NO: 201 - DNA, 2610 bp, Artificial Sequence
  Synthesized Sequence
atggccggagtgttcacactggaggacttcgtgggcgactggagacagaccgccggctacaacctggaccaggtgctggagcagggcggagtgagcagcctgtttcagaacctgggcgtgagcgtcacccccatccagaggatcgtgctgtccggcgagaatggcctgaagatcgacatccacgtcatcatcccctacgagggcctgagcggcgatcagatgggccagatcgagaagatcttcaaggtggtgtatcccgtcgacgaccaccacttcaaggtgatcctgcattacggcaccctcgtgatcgacggcgtgacccctaacatgatcgactacttcggcaggccctacgagggaatcgccgtgttcgacggaaagaagatcaccgtgaccggcaccctgtggaacggaaacaagatcatcgacgagaggctgatcaaccccgacggctccctgctgttcagggtgaccatcaatggcgtgaccggctggagactgtgcgagagaatcctggccggaggcggaggaagcctcgtgcccagaggatccggcggaggcggctccagccggctccatatgggaaactccgtggtcacatacaacaccctgatcgacggcctgtgcaaggccggcagactggacgaagccgaggagctgctggaggagatggaggagaagggcatcaagcccgacgtggtcacatacaccaccctgatcgacggcctgtgcaaggccggcaaggtggatgaggccctggagctgttcgacgagatgaaggagaggggcatcaagcccgacgtggtcacatacaccacactgatcgacggactgtgtaaagccggcgacgtggacgaagccctcgagctgttcaaagagatgcggagcaagggcgtgaagcccaacgtggtcacatacaccacactgatcgacggactgtgtaaagccggcgacgtggacgaagccctcgagctgttcaaagagatgcggagcaagggcgtgaagcccaacgtggtcacatacaccacactgatcgacggactgtgtaaagccggcgacgtggacgaagccctcgagctgttcaaagagatgcggagcaagggcgtgaagcccaacgtggtcacatacaccaccctgatcgacggcctgtgcaaggccggcaaggtggatgaggccctggagctgttcgacgagatgaaggagaggggcatcaagcccgacgtggtcacatacaacaccctgatcgacggcctgtgcaagagcggcaagatcgaggaggccctgaagctgttcaaggagatggaggagaagggcatcacccccagcgtggtcacatacaccaccctgatcgacggcctgtgcaaggccggcaaggtggacgaagccctggagctgttcgacgagatgaaggagaggggcatcaagcccgacgtggtcacatacaccacactgatcgacggactgtgtaaagccggcgacgtggacgaagccctcgagctgttcaaagagatgcggagcaagggcgtgaagcccaacgtggtcacatacaccacactgatcgacggactgtgtaaagccggcgacgtggacgaagccctcgagctgttcaaagagatgcggagcaagggcgtgaagcccaacgtggtcacatacaccacactgatcgacggactgtgtaaagccggcgacgtggacgaagccctcgagctgttcaaagagatgcggagcaagggcgtgaagcccaacgtggtcacatacaccaccctgatcgacggcctgtgcaaggccggcaaggtggacgaagccctggagctgttcgacgagatgaaggagaggggcatcaagcccgacgtggtcacatacaacaccctgatcgacggcctgtgcaaggccggcagactggacgaagccgaggagctgctggaggagatggaggagaagggcatcaagcccgacgtggtcacatacaccacactgatcgacggactgtgtaaagccggcgacgtggacgaagccctcgagctgttcaaagagatgcggagcaagggcgtgaagcccaacgtggtcacatacaccacactgatcgacggactgtgtaaagccggcgacgtggacgaagccctcgagctgttcaaagagatgcggagcaagggcgtgaagcccaacgtggtcacatacaccacactgatcgacggactgtgtaaagccggcgacgtggacgaagccctcgagctgttcaaagagatgcggagcaagggcgtgaagcccaacgtggtcacatacaccaccctgatcgacggcctgtgcaaggccggcaaggtggacgaagccctggagctgttcgacgagatgaaggagaggggcatcaagcccgacgtggtcacatacaacaccctgatcgacggcctgtgcaagagcggcaagatcgaggaggccctgaagctgttcaaggagatggaggagaagggcatcacccccagcgagctgacctacaacaccctgatcagcggcctgggcaaggccggcagagccagagacccccccgtgctcagtagcggctccggcggcagcgggggaggcgggcatcatcaccatcaccacggacgctag

SEQ ID NO: 202 - DNA, 2610 bp, Artificial Sequence
  Synthesized Sequence
atggccggagtgttcacactggaggacttcgtgggcgactggagacagaccgccggctacaacctggaccaggtgctggagcagggcggagtgagcagcctgtttcagaacctgggcgtgagcgtcacccccatccagaggatcgtgctgtccggcgagaatggcctgaagatcgacatccacgtcatcatcccctacgagggcctgagcggcgatcagatgggccagatcgagaagatcttcaaggtggtgtatcccgtcgacgaccaccacttcaaggtgatcctgcattacggcaccctcgtgatcgacggcgtgacccctaacatgatcgactacttcggcaggccctacgagggaatcgccgtgttcgacggaaagaagatcaccgtgaccggcaccctgtggaacggaaacaagatcatcgacgagaggctgatcaaccccgacggctccctgctgttcagggtgaccatcaatggcgtgaccggctggagactgtgcgagagaatcctggccggaggcggaggaagcctcgtgcccagaggatccggcggaggcggctccagccggctccatatgggaaactccgtggtcacatacaccaccctgatcgacggcctgtgcaaggccggcaaggtggatgaggccctggagctgttcgacgagatgaaggagaggggcatcaagcccgacgtggtcacatacaacaccctgatcgacggcctgtgcaagagcggcaagatcgaggaggccctgaagctgttcaaggagatggaggagaagggcatcacccccagcgtggtgacatacaccaccctgatcgacggcctgtgcaaggccggcaaagtggacgaggccctggagctgttcgacgagatgaaggagaggggcatcaagcccgacgtggtcacatacaccaccctgatcgacggcctgtgcaaggccggcaaggtggatgaggccctggagctgttcgacgagatgaaggagaggggcatcaagcccgacgtggttacatacaacaccctgatcgacggcctgtgcaagagcggcaagatcgaggaggccctgaagctgttcaaggagatggaggagaagggcatcacccccagcgtggtcacatacaccaccctgatcgacggcctgtgcaaggccggcaaggtggatgaggccctggagctgttcgacgagatgaaggagaggggcatcaagcccgacgtggttacatacaccaccctgatcgacggcctgtgcaaggccggcaaagtggacgaggccctggagctgttcgacgagatgaaggagaggggcatcaagcccgacgtggtcacatacaacaccctgatcgacggcctgtgcaagagcggcaagatcgaggaggccctgaagctgttcaaggagatggaggagaagggcatcacccccagcgtggtgacatacaccaccctgatcgacggcctgtgcaaggccggcaaagtggacgaggccctggagctgttcgacgagatgaaggagaggggcatcaagcccgacgtggtcacatacaccaccctgatcgacggcctgtgcaaggccggcaaggtggatgaggccctggagctgttcgacgagatgaaggagaggggcatcaagcccgacgtggttacatacaacaccctgatcgacggcctgtgcaagagcggcaagatcgaggaggccctgaagctgttcaaggagatggaggagaagggcatcacccccagcgtggtcacatacaccaccctgatcgacggcctgtgcaaggccggcaaggtggatgaggccctggagctgttcgacgagatgaaggagaggggcatcaagcccgacgtggtcacatacaccaccctgatcgacggcctgtgcaaggccggcaaagtggacgaggccctggagctgttcgacgagatgaaggagaggggcatcaagcccgacgtggtcacatacaacaccctgatcgacggcctgtgcaagagcggcaagatcgaggaggccctgaagctgttcaaggagatggaggagaagggcatcacccccagcgtggttacatacaccaccctgatcgacggcctgtgcaaggccggcaaagtggacgaggccctggagctgttcgacgagatgaaggagaggggcatcaagcccgacgtggtcacatacaccaccctgatcgacggcctgtgcaaggccggcaaggtggatgaggccctggagctgttcgacgagatgaaggagaggggcatcaagcccgacgtggtgacatacaacaccctgatcgacggcctgtgcaagagcggcaagatcgaggaggccctgaagctgttcaaggagatggaggagaagggcatcacccccagcgtggtcacatacaccaccctgatcgacggcctgtgcaaggccggcaaggtggatgaggccctggagctgttcgacgagatgaaggagaggggcatcaagcccgacgagctgacctacaacaccctgatcagcggcctgggcaaggccggcagagccagagacccccccgtgctcagtagcggctccggcggcagcgggggaggcgggcatcatcaccatcaccacggacgctag

SEQ ID NO: 203 - DNA, 2610 bp, Artificial Sequence
  Synthesized Sequence
atggccggagtgttcacactggaggacttcgtgggcgactggagacagaccgccggctacaacctggaccaggtgctggagcagggcggagtgagcagcctgtttcagaacctgggcgtgagcgtcacccccatccagaggatcgtgctgtccggcgagaatggcctgaagatcgacatccacgtcatcatcccctacgagggcctgagcggcgatcagatgggccagatcgagaagatcttcaaggtggtgtatcccgtcgacgaccaccacttcaaggtgatcctgcattacggcaccctcgtgatcgacggcgtgacccctaacatgatcgactacttcggcaggccctacgagggaatcgccgtgttcgacggaaagaagatcaccgtgaccggcaccctgtggaacggaaacaagatcatcgacgagaggctgatcaaccccgacggctccctgctgttcagggtgaccatcaatggcgtgaccggctggagactgtgcgagagaatcctggccggaggcggaggaagcctcgtgcccagaggatccggcggaggcggctccagccggctccatatgggaaactccgtggtcacatacaacaccctgatcgacggcctgtgcaagagcggcaagatcgaggaggccctgaagctgttcaaggagatggaggagaagggcatcacccccagcgtggtcacatacaacaccctgatcgacggcctgtgcaaggccggcagactggatgaggccgaggagctgctggaggagatggaggagaagggcatcaagcccgacgtggtgacatacaccaccctgatcgacggcctgtgcaaggccggcaaagtggacgaggccctggagctgttcgacgagatgaaggagaggggcatcaagcccgacgtggtcacatacaccaccctgatcgacggcctgtgcaaggccggcaaggtggatgaggccctggagctgttcgacgagatgaaggagaggggcatcaagcccgacgtggttacatacaccacactgatcgacggactgtgtaaagccggcgacgtggacgaagccctcgagctgttcaaagagatgcggagcaagggcgtgaagcccaacgtggtcacatacaacaccctgatcgacggcctgtgcaaggccggcagactggatgaggccgaggagctgctggaggagatggaggagaagggcatcaagcccgacgtggttacatacaacaccctgatcgacggcctgtgcaagagcggcaagatcgaggaggccctgaagctgttcaaggagatggaggagaagggcatcacccccagcgtggtcacatacaacaccctgatcgacggcctgtgcaaggccggcagactggatgaggccgaggagctgctggaggagatggaggagaagggcatcaagcccgacgtggtgacatacaacaccctgatcgacggcctgtgcaaggccggcagactggatgaggccgaggagctgctggaggagatggaggagaagggcatcaagcccgacgtggtcacatacaccacactgatcgacggactgtgtaaagccggcgacgtggacgaagccctcgagctgttcaaagagatgcggagcaagggcgtgaagcccaacgtggttacatacaccaccctgatcgacggcctgtgcaaggccggcaaagtggacgaggccctggagctgttcgacgagatgaaggagaggggcatcaagcccgacgtggtcacatacaacaccctgatcgacggcctgtgcaagagcggcaagatcgaggaggccctgaagctgttcaaggagatggaggagaagggcatcacccccagcgtggtcacatacaccacactgatcgacggactgtgtaaagccggcgacgtggacgaagccctcgagctgttcaaagagatgcggagcaagggcgtgaagcccaacgtggtcacatacaccacactgatcgacggactgtgtaaagccggcgacgtggacgaagccctcgagctgttcaaagagatgcggagcaagggcgtgaagcccaacgtggttacatacaacaccctgatcgacggcctgtgcaagagcggcaagatcgaggaggccctgaagctgttcaaggagatggaggagaagggcatcacccccagcgtggtcacatacaccaccctgatcgacggcctgtgcaaggccggcaaggtggatgaggccctggagctgttcgacgagatgaaggagaggggcatcaagcccgacgtggtgacatacaacaccctgatcgacggcctgtgcaaggccggcagactggatgaggccgaggagctgctggaggagatggaggagaagggcatcaagcccgacgtggtcacatacaacaccctgatcgacggcctgtgcaagagcggcaagatcgaggaggccctgaagctgttcaaggagatggaggagaagggcatcacccccagcgagctgacctacaacaccctgatcagcggcctgggcaaggccggcagagccagagacccccccgtgctcagtagcggctccggcggcagcgggggaggcgggcatcatcaccatcaccacggacgctag

SEQ ID NO: 204 - DNA, 2610 bp, Artificial Sequence
  Synthesized Sequence
atggccggagtgttcacactggaggacttcgtgggcgactggagacagaccgccggctacaacctggaccaggtgctggagcagggcggagtgagcagcctgtttcagaacctgggcgtgagcgtcacccccatccagaggatcgtgctgtccggcgagaatggcctgaagatcgacatccacgtcatcatcccctacgagggcctgagcggcgatcagatgggccagatcgagaagatcttcaaggtggtgtatcccgtcgacgaccaccacttcaaggtgatcctgcattacggcaccctcgtgatcgacggcgtgacccctaacatgatcgactacttcggcaggccctacgagggaatcgccgtgttcgacggaaagaagatcaccgtgaccggcaccctgtggaacggaaacaagatcatcgacgagaggctgatcaaccccgacggctccctgctgttcagggtgaccatcaatggcgtgaccggctggagactgtgcgagagaatcctggccggaggcggaggaagcctcgtgcccagaggatccggcggaggcggctccagccggctccatatgggaaactccgtggtcacatacaccaccctgatcgacggcctgtgcaaggccggcaaggtggatgaggccctggagctgttcgacgagatgaaggagaggggcatcaagcccgacgtggtcacatacaacaccctgatcgacggcctgtgcaaggccggcagactggatgaggccgaggagctgctggaggagatggaggagaagggcatcaagcccgacgtggtgacatacaacaccctgatcgacggcctgtgcaagagcggcaagatcgaggaggccctgaagctgttcaaggagatggaggagaagggcatcacccccagcgtggtcacatacaacaccctgatcgacggcctgtgcaaggccggcagactggatgaggccgaggagctgctggaggagatggaggagaagggcatcaagcccgacgtggttacatacaccacactgatcgacggactgtgtaaagccggcgacgtggacgaagccctcgagctgttcaaagagatgcggagcaagggcgtgaagcccaacgtggtcacatacaacaccctgatcgacggcctgtgcaaggccggcagactggatgaggccgaggagctgctggaggagatggaggagaagggcatcaagcccgacgtggttacatacaacaccctgatcgacggcctgtgcaaggccggcagactggatgaggccgaggagctgctggaggagatggaggagaagggcatcaagcccgacgtggtcacatacaacaccctgatcgacggcctgtgcaaggccggcagactggatgaggccgaggagctgctggaggagatggaggagaagggcatcaagcccgacgtggtgacatacaacaccctgatcgacggcctgtgcaaggccggcagactggatgaggccgaggagctgctggaggagatggaggagaagggcatcaagcccgacgtggtcacatacaacaccctgatcgacggcctgtgcaagagcggcaagatcgaggaggccctgaagctgttcaaggagatggaggagaagggcatcacccccagcgtggttacatacaacaccctgatcgacggcctgtgcaagagcggcaagatcgaggaggccctgaagctgttcaaggagatggaggagaagggcatcacccccagcgtggtcacatacaacaccctgatcgacggcctgtgcaagagcggcaagatcgaggaggccctgaagctgttcaaggagatggaggagaagggcatcacccccagcgtggtcacatacaccacactgatcgacggactgtgtaaagccggcgacgtggacgaagccctcgagctgttcaaagagatgcggagcaagggcgtgaagcccaacgtggtcacatacaacaccctgatcgacggcctgtgcaagagcggcaagatcgaggaggccctgaagctgttcaaggagatggaggagaagggcatcacccccagcgtggttacatacaacaccctgatcgacggcctgtgcaagagcggcaagatcgaggaggccctgaagctgttcaaggagatggaggagaagggcatcacccccagcgtggtcacatacaacaccctgatcgacggcctgtgcaagagcggcaagatcgaggaggccctgaagctgttcaaggagatggaggagaagggcatcacccccagcgtggtgacatacaacaccctgatcgacggcctgtgcaaggccggcagactggatgaggccgaggagctgctggaggagatggaggagaagggcatcaagcccgacgtggtcacatacaacaccctgatcgacggcctgtgcaaggccggcagactggatgaggccgaggagctgctggaggagatggaggagaagggcatcaagcccgacgagctgacctacaacaccctgatcagcggcctgggcaaggccggcagagccagagacccccccgtgctcagtagcggctccggcggcagcgggggaggcgggcatcatcaccatcaccacggacgctag

SEQ ID NO: 205 - DNA, 2610 bp, Artificial Sequence
  Synthesized Sequence
atggccggagtgttcacactggaggacttcgtgggcgactggagacagaccgccggctacaacctggaccaggtgctggagcagggcggagtgagcagcctgtttcagaacctgggcgtgagcgtcacccccatccagaggatcgtgctgtccggcgagaatggcctgaagatcgacatccacgtcatcatcccctacgagggcctgagcggcgatcagatgggccagatcgagaagatcttcaaggtggtgtatcccgtcgacgaccaccacttcaaggtgatcctgcattacggcaccctcgtgatcgacggcgtgacccctaacatgatcgactacttcggcaggccctacgagggaatcgccgtgttcgacggaaagaagatcaccgtgaccggcaccctgtggaacggaaacaagatcatcgacgagaggctgatcaaccccgacggctccctgctgttcagggtgaccatcaatggcgtgaccggctggagactgtgcgagagaatcctggccggaggcggaggaagcctcgtgcccagaggatccggcggaggcggctccagccggctccatatgggaaactccgtggtcacatacaacaccctgatcgacggcctgtgcaaggccggcagactggatgaggccgaggagctgctggaggagatggaggagaagggcatcaagcccgacgtggtcacatacaacaccctgatcgacggcctgtgcaaggccggcagactggatgaggccgaggagctgctggaggagatggaggagaagggcatcaagcccgacgtggtgacatacaccaccctgatcgacggcctgtgcaaggccggcaaagtggacgaggccctggagctgttcgacgagatgaaggagaggggcatcaagcccgacgtggtcacatacaccaccctgatcgacggcctgtgcaaggccggcaaggtggatgaggccctggagctgttcgacgagatgaaggagaggggcatcaagcccgacgtggttacatacaacaccctgatcgacggcctgtgcaaggccggcagactggatgaggccgaggagctgctggaggagatggaggagaagggcatcaagcccgacgtggtcacatacaccacactgatcgacggactgtgtaaagccggcgacgtggacgaagccctcgagctgttcaaagagatgcggagcaagggcgtgaagcccaacgtggttacatacaacaccctgatcgacggcctgtgcaaggccggcagactggatgaggccgaggagctgctggaggagatggaggagaagggcatcaagcccgacgtggtcacatacaacaccctgatcgacggcctgtgcaagagcggcaagatcgaggaggccctgaagctgttcaaggagatggaggagaagggcatcacccccagcgtggtgacatacaccacactgatcgacggactgtgtaaagccggcgacgtggacgaagccctcgagctgttcaaagagatgcggagcaagggcgtgaagcccaacgtggtcacatacaccacactgatcgacggactgtgtaaagccggcgacgtggacgaagccctcgagctgttcaaagagatgcggagcaagggcgtgaagcccaacgtggttacatacaccaccctgatcgacggcctgtgcaaggccggcaaagtggacgaggccctggagctgttcgacgagatgaaggagaggggcatcaagcccgacgtggtcacatacaccaccctgatcgacggcctgtgcaaggccggcaaggtggatgaggccctggagctgttcgacgagatgaaggagaggggcatcaagcccgacgtggtcacatacaacaccctgatcgacggcctgtgcaaggccggcagactggatgaggccgaggagctgctggaggagatggaggagaagggcatcaagcccgacgtggtcacatacaacaccctgatcgacggcctgtgcaaggccggcagactggatgaggccgaggagctgctggaggagatggaggagaagggcatcaagcccgacgtggttacatacaccacactgatcgacggactgtgtaaagccggcgacgtggacgaagccctcgagctgttcaaagagatgcggagcaagggcgtgaagcccaacgtggtcacatacaacaccctgatcgacggcctgtgcaagagcggcaagatcgaggaggccctgaagctgttcaaggagatggaggagaagggcatcacccccagcgtggtgacatacaccacactgatcgacggactgtgtaaagccggcgacgtggacgaagccctcgagctgttcaaagagatgcggagcaagggcgtgaagcccaacgtggtcacatacaccacactgatcgacggactgtgtaaagccggcgacgtggacgaagccctcgagctgttcaaagagatgcggagcaagggcgtgaagcccaacgagctgacctacaacaccctgatcagcggcctgggcaaggccggcagagccagagacccccccgtgctcagtagcggctccggcggcagcgggggaggcgggcatcatcaccatcaccacggacgctag

SEQ ID NO: 206 - DNA, 2610 bp, Artificial Sequence
  Synthesized Sequence
atggccggagtgttcacactggaggacttcgtgggcgactggagacagaccgccggctacaacctggaccaggtgctggagcagggcggagtgagcagcctgtttcagaacctgggcgtgagcgtcacccccatccagaggatcgtgctgtccggcgagaatggcctgaagatcgacatccacgtcatcatcccctacgagggcctgagcggcgatcagatgggccagatcgagaagatcttcaaggtggtgtatcccgtcgacgaccaccacttcaaggtgatcctgcattacggcaccctcgtgatcgacggcgtgacccctaacatgatcgactacttcggcaggccctacgagggaatcgccgtgttcgacggaaagaagatcaccgtgaccggcaccctgtggaacggaaacaagatcatcgacgagaggctgatcaaccccgacggctccctgctgttcagggtgaccatcaatggcgtgaccggctggagactgtgcgagagaatcctggccggaggcggaggaagcctcgtgcccagaggatccggcggaggcggctccagccggctccatatgggaaactccgtggtcacatacaccaccctgatcgacggcctgtgcaaggccggcaaggtggacgaagccctggagctgttcgacgagatgaaggagaggggcatcaagcccgacgtggtcacatacaacaccctgatcgacggcctgtgcaagagcggcaagatcgaggaggccctgaagctgttcaaggagatggaggagaagggcatcacccccagcgtggtcacatacaacaccctgatcgacggcctgtgcaaggccggcagactggatgaggccgaggagctgctggaggagatggaggagaagggcatcaagcccgacgtggtcacatacaacaccctgatcgacggcctgtgcaagagcggcaagatcgaggaggccctgaagctgttcaaggagatggaggagaagggcatcacccccagcgtggtcacatacaccaccctgatcgacggcctgtgcaaggccggcaaggtggacgaagccctggagctgttcgacgagatgaaggagaggggcatcaagcccgacgtggtcacatacaacaccctgatcgacggcctgtgcaaggccggcagactggatgaggccgaggagctgctggaggagatggaggagaagggcatcaagcccgacgtggtcacatacaccaccctgatcgacggcctgtgcaaggccggcaaagtggacgaggccctggagctgttcgacgagatgaaggagaggggcatcaagcccgacgtggtcacatacaccaccctgatcgacggcctgtgcaaggccggcaaggtggacgaagccctggagctgttcgacgagatgaaggagaggggcatcaagcccgacgtggtcacatacaccacactgatcgacggactgtgtaaagccggcgacgtggacgaagccctcgagctgttcaaagagatgcggagcaagggcgtgaagcccaacgtggtcacatacaccaccctgatcgacggcctgtgcaaggccggcaaggtggatgaggccctggagctgttcgacgagatgaaggagaggggcatcaagcccgacgtggtcacatacaccacactgatcgacggactgtgtaaagccggcgacgtggacgaagccctcgagctgttcaaagagatgcggagcaagggcgtgaagcccaacgtggtcacatacaacaccctgatcgacggcctgtgcaagagcggcaagatcgaggaggccctgaagctgttcaaggagatggaggagaagggcatcacccccagcgtggtcacatacaacaccctgatcgacggcctgtgcaagagcggcaagatcgaggaggccctgaagctgttcaaggagatggaggagaagggcatcacccccagcgtggtcacatacaccacactgatcgacggactgtgtaaagccggcgacgtggacgaagccctcgagctgttcaaagagatgcggagcaagggcgtgaagcccaacgtggtcacatacaacaccctgatcgacggcctgtgcaaggccggcagactggatgaggccgaggagctgctggaggagatggaggagaagggcatcaagcccgacgtggtcacatacaacaccctgatcgacggcctgtgcaagagcggcaagatcgaggaggccctgaagctgttcaaggagatggaggagaagggcatcacccccagcgtggtcacatacaacaccctgatcgacggcctgtgcaaggccggcagactggacgaagccgaggagctgctggaggagatggaggagaagggcatcaagcccgacgtggtcacatacaacaccctgatcgacggcctgtgcaaggccggcagactggatgaggccgaggagctgctggaggagatggaggagaagggcatcaagcccgacgagctgacctacaacaccctgatcagcggcctgggcaaggccggcagagccagagacccccccgtgctcagtagcggctccggcggcagcgggggaggcgggcatcatcaccatcaccacggacgctag

SEQ ID NO: 207 - DNA, 2610 bp, Artificial Sequence
  Synthesized Sequence
atggccggagtgttcacactggaggacttcgtgggcgactggagacagaccgccggctacaacctggaccaggtgctggagcagggcggagtgagcagcctgtttcagaacctgggcgtgagcgtcacccccatccagaggatcgtgctgtccggcgagaatggcctgaagatcgacatccacgtcatcatcccctacgagggcctgagcggcgatcagatgggccagatcgagaagatcttcaaggtggtgtatcccgtcgacgaccaccacttcaaggtgatcctgcattacggcaccctcgtgatcgacggcgtgacccctaacatgatcgactacttcggcaggccctacgagggaatcgccgtgttcgacggaaagaagatcaccgtgaccggcaccctgtggaacggaaacaagatcatcgacgagaggctgatcaaccccgacggctccctgctgttcagggtgaccatcaatggcgtgaccggctggagactgtgcgagagaatcctggccggaggcggaggaagcctcgtgcccagaggatccggcggaggcggctccagccggctccatatgggaaactccgtggtcacatacaccaccctgatcgacggcctgtgcaaggccggcaaggtggacgaagccctggagctgttcgacgagatgaaggagaggggcatcaagcccgacgtggtcacatacaccaccctgatcgacggcctgtgcaaggccggcaaggtggatgaggccctggagctgttcgacgagatgaaggagaggggcatcaagcccgacgtggtcacatacaccacactgatcgacggactgtgtaaagccggcgacgtggacgaagccctcgagctgttcaaagagatgcggagcaagggcgtgaagcccaacgtggtcacatacaccaccctgatcgacggcctgtgcaaggccggcaaggtggacgaagccctggagctgttcgacgagatgaaggagaggggcatcaagcccgacgtggtcacatacaacaccctgatcgacggcctgtgcaagagcggcaagatcgaggaggccctgaagctgttcaaggagatggaggagaagggcatcacccccagcgtggtcacatacaccaccctgatcgacggcctgtgcaaggccggcaaggtggatgaggccctggagctgttcgacgagatgaaggagaggggcatcaagcccgacgtggtcacatacaccacactgatcgacggactgtgtaaagccggcgacgtggacgaagccctcgagctgttcaaagagatgcggagcaagggcgtgaagcccaacgtggtcacatacaccaccctgatcgacggcctgtgcaaggccggcaaggtggacgaagccctggagctgttcgacgagatgaaggagaggggcatcaagcccgacgtggtcacatacaacaccctgatcgacggcctgtgcaagagcggcaagatcgaggaggccctgaagctgttcaaggagatggaggagaagggcatcacccccagcgtggtcacatacaccacactgatcgacggactgtgtaaagccggcgacgtggacgaagccctcgagctgttcaaagagatgcggagcaagggcgtgaagcccaacgtggtcacatacaacaccctgatcgacggcctgtgcaaggccggcagactggatgaggccgaggagctgctggaggagatggaggagaagggcatcaagcccgacgtggtcacatacaacaccctgatcgacggcctgtgcaagagcggcaagatcgaggaggccctgaagctgttcaaggagatggaggagaagggcatcacccccagcgtggtcacatacaacaccctgatcgacggcctgtgcaagagcggcaagatcgaggaggccctgaagctgttcaaggagatggaggagaagggcatcacccccagcgtggtcacatacaacaccctgatcgacggcctgtgcaagagcggcaagatcgaggaggccctgaagctgttcaaggagatggaggagaagggcatcacccccagcgtggtcacatacaacaccctgatcgacggcctgtgcaagagcggcaagatcgaggaggccctgaagctgttcaaggagatggaggagaagggcatcacccccagcgtggtcacatacaacaccctgatcgacggcctgtgcaagagcggcaagatcgaggaggccctgaagctgttcaaggagatggaggagaagggcatcacccccagcgtggtcacatacaccacactgatcgacggactgtgtaaagccggcgacgtggacgaagccctcgagctgttcaaagagatgcggagcaagggcgtgaagcccaacgtggtcacatacaccacactgatcgacggactgtgtaaagccggcgacgtggacgaagccctcgagctgttcaaagagatgcggagcaagggcgtgaagcccaacgagctgacctacaacaccctgatcagcggcctgggcaaggccggcagagccagagacccccccgtgctcagtagcggctccggcggcagcgggggaggcgggcatcatcaccatcaccacggacgctag

SEQ ID NO: 208 - DNA, 2610 bp, Artificial Sequence
  Synthesized Sequence
atggccggagtgttcacactggaggacttcgtgggcgactggagacagaccgccggctacaacctggaccaggtgctggagcagggcggagtgagcagcctgtttcagaacctgggcgtgagcgtcacccccatccagaggatcgtgctgtccggcgagaatggcctgaagatcgacatccacgtcatcatcccctacgagggcctgagcggcgatcagatgggccagatcgagaagatcttcaaggtggtgtatcccgtcgacgaccaccacttcaaggtgatcctgcattacggcaccctcgtgatcgacggcgtgacccctaacatgatcgactacttcggcaggccctacgagggaatcgccgtgttcgacggaaagaagatcaccgtgaccggcaccctgtggaacggaaacaagatcatcgacgagaggctgatcaaccccgacggctccctgctgttcagggtgaccatcaatggcgtgaccggctggagactgtgcgagagaatcctggccggaggcggaggaagcctcgtgcccagaggatccggcggaggcggctccagccggctccatatgggaaactccgtggtcacatacaacaccctgatcgacggcctgtgcaagagcggcaagatcgaggaggccctgaagctgttcaaggagatggaggagaagggcatcacccccagcgtggtcacatacaacaccctgatcgacggcctgtgcaaggccggcagactggatgaggccgaggagctgctggaggagatggaggagaagggcatcaagcccgacgtggtgacatacaacaccctgatcgacggcctgtgcaaggccggcagactggatgaggccgaggagctgctggaggagatggaggagaagggcatcaagcccgacgtggtcacatacaacaccctgatcgacggcctgtgcaaggccggcagactggatgaggccgaggagctgctggaggagatggaggagaagggcatcaagcccgacgtggttacatacaacaccctgatcgacggcctgtgcaaggccggcagactggatgaggccgaggagctgctggaggagatggaggagaagggcatcaagcccgacgtggtcacatacaacaccctgatcgacggcctgtgcaaggccggcagactggatgaggccgaggagctgctggaggagatggaggagaagggcatcaagcccgacgtggttacatacaacaccctgatcgacggcctgtgcaaggccggcagactggatgaggccgaggagctgctggaggagatggaggagaagggcatcaagcccgacgtggtcacatacaacaccctgatcgacggcctgtgcaagagcggcaagatcgaggaggccctgaagctgttcaaggagatggaggagaagggcatcacccccagcgtggtgacatacaacaccctgatcgacggcctgtgcaaggccggcagactggatgaggccgaggagctgctggaggagatggaggagaagggcatcaagcccgacgtggtcacatacaccaccctgatcgacggcctgtgcaaggccggcaaggtggatgaggccctggagctgttcgacgagatgaaggagaggggcatcaagcccgacgtggttacatacaccaccctgatcgacggcctgtgcaaggccggcaaagtggacgaggccctggagctgttcgacgagatgaaggagaggggcatcaagcccgacgtggtcacatacaacaccctgatcgacggcctgtgcaagagcggcaagatcgaggaggccctgaagctgttcaaggagatggaggagaagggcatcacccccagcgtggtcacatacaacaccctgatcgacggcctgtgcaaggccggcagactggatgaggccgaggagctgctggaggagatggaggagaagggcatcaagcccgacgtggtcacatacaccacactgatcgacggactgtgtaaagccggcgacgtggacgaagccctcgagctgttcaaagagatgcggagcaagggcgtgaagcccaacgtggttacatacaacaccctgatcgacggcctgtgcaagagcggcaagatcgaggaggccctgaagctgttcaaggagatggaggagaagggcatcacccccagcgtggtcacatacaacaccctgatcgacggcctgtgcaagagcggcaagatcgaggaggccctgaagctgttcaaggagatggaggagaagggcatcacccccagcgtggtgacatacaccacactgatcgacggactgtgtaaagccggcgacgtggacgaagccctcgagctgttcaaagagatgcggagcaagggcgtgaagcccaacgtggtcacatacaccacactgatcgacggactgtgtaaagccggcgacgtggacgaagccctcgagctgttcaaagagatgcggagcaagggcgtgaagcccaacgagctgacctacaacaccctgatcagcggcctgggcaaggccggcagagccagagacccccccgtgctcagtagcggctccggcggcagcgggggaggcgggcatcatcaccatcaccacggacgctag

SEQ ID NO: 209 - DNA, 2610 bp, Artificial Sequence
  Synthesized Sequence
atggccggagtgttcacactggaggacttcgtgggcgactggagacagaccgccggctacaacctggaccaggtgctggagcagggcggagtgagcagcctgtttcagaacctgggcgtgagcgtcacccccatccagaggatcgtgctgtccggcgagaatggcctgaagatcgacatccacgtcatcatcccctacgagggcctgagcggcgatcagatgggccagatcgagaagatcttcaaggtggtgtatcccgtcgacgaccaccacttcaaggtgatcctgcattacggcaccctcgtgatcgacggcgtgacccctaacatgatcgactacttcggcaggccctacgagggaatcgccgtgttcgacggaaagaagatcaccgtgaccggcaccctgtggaacggaaacaagatcatcgacgagaggctgatcaaccccgacggctccctgctgttcagggtgaccatcaatggcgtgaccggctggagactgtgcgagagaatcctggccggaggcggaggaagcctcgtgcccagaggatccggcggaggcggctccagccggctccatatgggaaactccgtggtcacatacaacaccctgatcgacggcctgtgcaagagcggcaagatcgaggaggccctgaagctgttcaaggagatggaggagaagggcatcacccccagcgtggtcacatacaacaccctgatcgacggcctgtgcaaggccggcagactggatgaggccgaggagctgctggaggagatggaggagaagggcatcaagcccgacgtggtcacatacaacaccctgatcgacggcctgtgcaagagcggcaagatcgaggaggccctgaagctgttcaaggagatggaggagaagggcatcacccccagcgtggtcacatacaacaccctgatcgacggcctgtgcaagagcggcaagatcgaggaggccctgaagctgttcaaggagatggaggagaagggcatcacccccagcgtggtcacatacaacaccctgatcgacggcctgtgcaaggccggcagactggacgaagccgaggagctgctggaggagatggaggagaagggcatcaagcccgacgtggtcacatacaacaccctgatcgacggcctgtgcaagagcggcaagatcgaggaggccctgaagctgttcaaggagatggaggagaagggcatcacccccagcgtggtcacatacaacaccctgatcgacggcctgtgcaagagcggcaagatcgaggaggccctgaagctgttcaaggagatggaggagaagggcatcacccccagcgtggtcacatacaacaccctgatcgacggcctgtgcaaggccggcagactggacgaggccgaagagctgctggaggagatggaggagaagggcatcaagcccgacgtggtcacatacaccaccctgatcgacggcctgtgcaaggccggcaaggtggacgaagccctggagctgttcgacgagatgaaggagaggggcatcaagcccgacgtggtcacatacaccacactgatcgacggactgtgtaaagccggcgacgtggacgaagccctcgagctgttcaaagagatgcggagcaagggcgtgaagcccaacgtggtcacatacaccaccctgatcgacggcctgtgcaaggccggcaaagtggacgaggccctggagctgttcgacgagatgaaggagaggggcatcaagcccgacgtggtcacatacaacaccctgatcgacggcctgtgcaagagcggcaagatcgaggaggccctgaagctgttcaaggagatggaggagaagggcatcacccccagcgtggtcacatacaccaccctgatcgacggcctgtgcaaggccggcaaggtggacgaagccctggagctgttcgacgagatgaaggagaggggcatcaagcccgacgtggtcacatacaacaccctgatcgacggcctgtgcaagagcggcaagatcgaggaggccctgaagctgttcaaggagatggaggagaagggcatcacccccagcgtggtcacatacaccacactgatcgacggactgtgtaaagccggcgacgtggacgaagccctcgagctgttcaaagagatgcggagcaagggcgtgaagcccaacgtggtcacatacaccacactgatcgacggactgtgtaaagccggcgacgtggacgaagccctcgagctgttcaaagagatgcggagcaagggcgtgaagcccaacgtggtcacatacaccaccctgatcgacggcctgtgcaaggccggcaaggtggacgaagccctggagctgttcgacgagatgaaggagaggggcatcaagcccgacgtggtcacatacaacaccctgatcgacggcctgtgcaaggccggcagactggatgaggccgaggagctgctggaggagatggaggagaagggcatcaagcccgacgagctgacctacaacaccctgatcagcggcctgggcaaggccggcagagccagagacccccccgtgctcagtagcggctccggcggcagcgggggaggcgggcatcatcaccatcaccacggacgctag

SEQ ID NO: 210 - DNA, 2610 bp, Artificial Sequence
  Synthesized Sequence
atggccggagtgttcacactggaggacttcgtgggcgactggagacagaccgccggctacaacctggaccaggtgctggagcagggcggagtgagcagcctgtttcagaacctgggcgtgagcgtcacccccatccagaggatcgtgctgtccggcgagaatggcctgaagatcgacatccacgtcatcatcccctacgagggcctgagcggcgatcagatgggccagatcgagaagatcttcaaggtggtgtatcccgtcgacgaccaccacttcaaggtgatcctgcattacggcaccctcgtgatcgacggcgtgacccctaacatgatcgactacttcggcaggccctacgagggaatcgccgtgttcgacggaaagaagatcaccgtgaccggcaccctgtggaacggaaacaagatcatcgacgagaggctgatcaaccccgacggctccctgctgttcagggtgaccatcaatggcgtgaccggctggagactgtgcgagagaatcctggccggaggcggaggaagcctcgtgcccagaggatccggcggaggcggctccagccggctccatatgggaaactccgtggtcacatacaacaccctgatcgacggcctgtgcaagagcggcaagatcgaggaggccctgaagctgttcaaggagatggaggagaagggcatcacccccagcgtggtcacatacaccaccctgatcgacggcctgtgcaaggccggcaaggtggatgaggccctggagctgttcgacgagatgaaggagaggggcatcaagcccgacgtggtcacatacaacaccctgatcgacggcctgtgcaagagcggcaagatcgaggaggccctgaagctgttcaaggagatggaggagaagggcatcacccccagcgtggtcacatacaacaccctgatcgacggcctgtgcaagagcggcaagatcgaggaggccctgaagctgttcaaggagatggaggagaagggcatcacccccagcgtggtcacatacaacaccctgatcgacggcctgtgcaaggccggcagactggacgaagccgaggagctgctggaggagatggaggagaagggcatcaagcccgacgtggtcacatacaacaccctgatcgacggcctgtgcaagagcggcaagatcgaggaggccctgaagctgttcaaggagatggaggagaagggcatcacccccagcgtggtcacatacaacaccctgatcgacggcctgtgcaaggccggcagactggatgaggccgaggagctgctggaggagatggaggagaagggcatcaagcccgacgtggtcacatacaccaccctgatcgacggcctgtgcaaggccggcaaggtggacgaagccctggagctgttcgacgagatgaaggagaggggcatcaagcccgacgtggtcacatacaccaccctgatcgacggcctgtgcaaggccggcaaggtggacgaagccctggagctgttcgacgagatgaaggagaggggcatcaagcccgacgtggtcacatacaacaccctgatcgacggcctgtgcaagagcggcaagatcgaggaggccctgaagctgttcaaggagatggaggagaagggcatcacccccagcgtggtcacatacaacaccctgatcgacggcctgtgcaagagcggcaagatcgaggaggccctgaagctgttcaaggagatggaggagaagggcatcacccccagcgtggtcacatacaccaccctgatcgacggcctgtgcaaggccggcaaggtggacgaagccctggagctgttcgacgagatgaaggagaggggcatcaagcccgacgtggtcacatacaacaccctgatcgacggcctgtgcaaggccggcagactggacgaagccgaggagctgctggaggagatggaggagaagggcatcaagcccgacgtggtcacatacaccacactgatcgacggactgtgtaaagccggcgacgtggacgaagccctcgagctgttcaaagagatgcggagcaagggcgtgaagcccaacgtggtcacatacaacaccctgatcgacggcctgtgcaagagcggcaagatcgaggaggccctgaagctgttcaaggagatggaggagaagggcatcacccccagcgtggtcacatacaacaccctgatcgacggcctgtgcaagagcggcaagatcgaggaggccctgaagctgttcaaggagatggaggagaagggcatcacccccagcgtggtcacatacaccacactgatcgacggactgtgtaaagccggcgacgtggacgaagccctcgagctgttcaaagagatgcggagcaagggcgtgaagcccaacgtggtcacatacaacaccctgatcgacggcctgtgcaagagcggcaagatcgaggaggccctgaagctgttcaaggagatggaggagaagggcatcacccccagcgagctgacctacaacaccctgatcagcggcctgggcaaggccggcagagccagagacccccccgtgctcagtagcggctccggcggcagcgggggaggcgggcatcatcaccatcaccacggacgctag

SEQ ID NO: 211 - DNA, 2610 bp, Artificial Sequence
  Synthesized Sequence
atggccggagtgttcacactggaggacttcgtgggcgactggagacagaccgccggctacaacctggaccaggtgctggagcagggcggagtgagcagcctgtttcagaacctgggcgtgagcgtcacccccatccagaggatcgtgctgtccggcgagaatggcctgaagatcgacatccacgtcatcatcccctacgagggcctgagcggcgatcagatgggccagatcgagaagatcttcaaggtggtgtatcccgtcgacgaccaccacttcaaggtgatcctgcattacggcaccctcgtgatcgacggcgtgacccctaacatgatcgactacttcggcaggccctacgagggaatcgccgtgttcgacggaaagaagatcaccgtgaccggcaccctgtggaacggaaacaagatcatcgacgagaggctgatcaaccccgacggctccctgctgttcagggtgaccatcaatggcgtgaccggctggagactgtgcgagagaatcctggccggaggcggaggaagcctcgtgcccagaggatccggcggaggcggctccagccggctccatatgggaaactccgtggtcacatacaccaccctgatcgacggcctgtgcaaggccggcaaggtggatgaggccctggagctgttcgacgagatgaaggagaggggcatcaagcccgacgtggtcacatacaacaccctgatcgacggcctgtgcaagagcggcaagatcgaggaggccctgaagctgttcaaggagatggaggagaagggcatcacccccagcgtggtgacatacaccacactgatcgacggactgtgtaaagccggcgacgtggacgaagccctcgagctgttcaaagagatgcggagcaagggcgtgaagcccaacgtggtcacatacaccaccctgatcgacggcctgtgcaaggccggcaaggtggatgaggccctggagctgttcgacgagatgaaggagaggggcatcaagcccgacgtggttacatacaacaccctgatcgacggcctgtgcaagagcggcaagatcgaggaggccctgaagctgttcaaggagatggaggagaagggcatcacccccagcgtggtcacatacaccacactgatcgacggactgtgtaaagccggcgacgtggacgaagccctcgagctgttcaaagagatgcggagcaagggcgtgaagcccaacgtggttacatacaccaccctgatcgacggcctgtgcaaggccggcaaagtggacgaggccctggagctgttcgacgagatgaaggagaggggcatcaagcccgacgtggtcacatacaacaccctgatcgacggcctgtgcaagagcggcaagatcgaggaggccctgaagctgttcaaggagatggaggagaagggcatcacccccagcgtggtgacatacaccacactgatcgacggactgtgtaaagccggcgacgtggacgaagccctcgagctgttcaaagagatgcggagcaagggcgtgaagcccaacgtggtcacatacaccaccctgatcgacggcctgtgcaaggccggcaaggtggatgaggccctggagctgttcgacgagatgaaggagaggggcatcaagcccgacgtggttacatacaacaccctgatcgacggcctgtgcaagagcggcaagatcgaggaggccctgaagctgttcaaggagatggaggagaagggcatcacccccagcgtggtcacatacaccacactgatcgacggactgtgtaaagccggcgacgtggacgaagccctcgagctgttcaaagagatgcggagcaagggcgtgaagcccaacgtggtcacatacaccaccctgatcgacggcctgtgcaaggccggcaaagtggacgaggccctggagctgttcgacgagatgaaggagaggggcatcaagcccgacgtggtcacatacaacaccctgatcgacggcctgtgcaagagcggcaagatcgaggaggccctgaagctgttcaaggagatggaggagaagggcatcacccccagcgtggttacatacaccacactgatcgacggactgtgtaaagccggcgacgtggacgaagccctcgagctgttcaaagagatgcggagcaagggcgtgaagcccaacgtggtcacatacaccaccctgatcgacggcctgtgcaaggccggcaaggtggatgaggccctggagctgttcgacgagatgaaggagaggggcatcaagcccgacgtggtgacatacaacaccctgatcgacggcctgtgcaagagcggcaagatcgaggaggccctgaagctgttcaaggagatggaggagaagggcatcacccccagcgtggtcacatacaccacactgatcgacggactgtgtaaagccggcgacgtggacgaagccctcgagctgttcaaagagatgcggagcaagggcgtgaagcccaacgagctgacctacaacaccctgatcagcggcctgggcaaggccggcagagccagagacccccccgtgctcagtagcggctccggcggcagcgggggaggcgggcatcatcaccatcaccacggacgctag

SEQ ID NO: 212 - DNA, 2610 bp, Artificial Sequence
  Synthesized Sequence
atggccggagtgttcacactggaggacttcgtgggcgactggagacagaccgccggctacaacctggaccaggtgctggagcagggcggagtgagcagcctgtttcagaacctgggcgtgagcgtcacccccatccagaggatcgtgctgtccggcgagaatggcctgaagatcgacatccacgtcatcatcccctacgagggcctgagcggcgatcagatgggccagatcgagaagatcttcaaggtggtgtatcccgtcgacgaccaccacttcaaggtgatcctgcattacggcaccctcgtgatcgacggcgtgacccctaacatgatcgactacttcggcaggccctacgagggaatcgccgtgttcgacggaaagaagatcaccgtgaccggcaccctgtggaacggaaacaagatcatcgacgagaggctgatcaaccccgacggctccctgctgttcagggtgaccatcaatggcgtgaccggctggagactgtgcgagagaatcctggccggaggcggaggaagcctcgtgcccagaggatccggcggaggcggctccagccggctccatatgggaaactccgtggtcacatacaccaccctgatcgacggcctgtgcaaggccggcaaggtggatgaggccctggagctgttcgacgagatgaaggagaggggcatcaagcccgacgtggtcacatacaacaccctgatcgacggcctgtgcaagagcggcaagatcgaggaggccctgaagctgttcaaggagatggaggagaagggcatcacccccagcgtggtgacatacaccaccctgatcgacggcctgtgcaaggccggcaaagtggacgaggccctggagctgttcgacgagatgaaggagaggggcatcaagcccgacgtggtcacatacaacaccctgatcgacggcctgtgcaagagcggcaagatcgaggaggccctgaagctgttcaaggagatggaggagaagggcatcacccccagcgtggttacatacaacaccctgatcgacggcctgtgcaagagcggcaagatcgaggaggccctgaagctgttcaaggagatggaggagaagggcatcacccccagcgtggtcacatacaacaccctgatcgacggcctgtgcaaggccggcagactggatgaggccgaggagctgctggaggagatggaggagaagggcatcaagcccgacgtggttacatacaccacactgatcgacggactgtgtaaagccggcgacgtggacgaagccctcgagctgttcaaagagatgcggagcaagggcgtgaagcccaacgtggtcacatacaacaccctgatcgacggcctgtgcaaggccggcagactggatgaggccgaggagctgctggaggagatggaggagaagggcatcaagcccgacgtggtgacatacaccacactgatcgacggactgtgtaaagccggcgacgtggacgaagccctcgagctgttcaaagagatgcggagcaagggcgtgaagcccaacgtggtcacatacaccaccctgatcgacggcctgtgcaaggccggcaaggtggatgaggccctggagctgttcgacgagatgaaggagaggggcatcaagcccgacgtggttacatacaacaccctgatcgacggcctgtgcaagagcggcaagatcgaggaggccctgaagctgttcaaggagatggaggagaagggcatcacccccagcgtggtcacatacaccacactgatcgacggactgtgtaaagccggcgacgtggacgaagccctcgagctgttcaaagagatgcggagcaagggcgtgaagcccaacgtggtcacatacaacaccctgatcgacggcctgtgcaagagcggcaagatcgaggaggccctgaagctgttcaaggagatggaggagaagggcatcacccccagcgtggtcacatacaacaccctgatcgacggcctgtgcaaggccggcagactggatgaggccgaggagctgctggaggagatggaggagaagggcatcaagcccgacgtggttacatacaacaccctgatcgacggcctgtgcaagagcggcaagatcgaggaggccctgaagctgttcaaggagatggaggagaagggcatcacccccagcgtggtcacatacaccaccctgatcgacggcctgtgcaaggccggcaaggtggatgaggccctggagctgttcgacgagatgaaggagaggggcatcaagcccgacgtggtgacatacaccacactgatcgacggactgtgtaaagccggcgacgtggacgaagccctcgagctgttcaaagagatgcggagcaagggcgtgaagcccaacgtggtcacatacaccacactgatcgacggactgtgtaaagccggcgacgtggacgaagccctcgagctgttcaaagagatgcggagcaagggcgtgaagcccaacgagctgacctacaacaccctgatcagcggcctgggcaaggccggcagagccagagacccccccgtgctcagtagcggctccggcggcagcgggggaggcgggcatcatcaccatcaccacggacgctag

SEQ ID NO: 213 - DNA, 2610 bp, Artificial Sequence
  Synthesized Sequence
atggccggagtgttcacactggaggacttcgtgggcgactggagacagaccgccggctacaacctggaccaggtgctggagcagggcggagtgagcagcctgtttcagaacctgggcgtgagcgtcacccccatccagaggatcgtgctgtccggcgagaatggcctgaagatcgacatccacgtcatcatcccctacgagggcctgagcggcgatcagatgggccagatcgagaagatcttcaaggtggtgtatcccgtcgacgaccaccacttcaaggtgatcctgcattacggcaccctcgtgatcgacggcgtgacccctaacatgatcgactacttcggcaggccctacgagggaatcgccgtgttcgacggaaagaagatcaccgtgaccggcaccctgtggaacggaaacaagatcatcgacgagaggctgatcaaccccgacggctccctgctgttcagggtgaccatcaatggcgtgaccggctggagactgtgcgagagaatcctggccggaggcggaggaagcctcgtgcccagaggatccggcggaggcggctccagccggctccatatgggaaactccgtggtcacatacaacaccctgatcgacggcctgtgcaaggccggcagactggacgaagccgaggagctgctggaggagatggaggagaagggcatcaagcccgacgtggtcacatacaacaccctgatcgacggcctgtgcaaggccggcagactggatgaggccgaggagctgctggaggagatggaggagaagggcatcaagcccgacgtggtcacatacaacaccctgatcgacggcctgtgcaagagcggcaagatcgaggaggccctgaagctgttcaaggagatggaggagaagggcatcacccccagcgtggtcacatacaccacactgatcgacggactgtgtaaagccggcgacgtggacgaagccctcgagctgttcaaagagatgcggagcaagggcgtgaagcccaacgtggtcacatacaacaccctgatcgacggcctgtgcaagagcggcaagatcgaggaggccctgaagctgttcaaggagatggaggagaagggcatcacccccagcgtggtcacatacaccacactgatcgacggactgtgtaaagccggcgacgtggacgaagccctcgagctgttcaaagagatgcggagcaagggcgtgaagcccaacgtggtcacatacaacaccctgatcgacggcctgtgcaagagcggcaagatcgaggaggccctgaagctgttcaaggagatggaggagaagggcatcacccccagcgtggtcacatacaacaccctgatcgacggcctgtgcaaggccggcagactggacgaggccgaagagctgctggaggagatggaggagaagggcatcaagcccgacgtggtcacatacaacaccctgatcgacggcctgtgcaagagcggcaagatcgaggaggccctgaagctgttcaaggagatggaggagaagggcatcacccccagcgtggtcacatacaccaccctgatcgacggcctgtgcaaggccggcaaggtggatgaggccctggagctgttcgacgagatgaaggagaggggcatcaagcccgacgtggtcacatacaccacactgatcgacggactgtgtaaagccggcgacgtggacgaagccctcgagctgttcaaagagatgcggagcaagggcgtgaagcccaacgtggtcacatacaccacactgatcgacggactgtgtaaagccggcgacgtggacgaagccctcgagctgttcaaagagatgcggagcaagggcgtgaagcccaacgtggtcacatacaccaccctgatcgacggcctgtgcaaggccggcaaggtggacgaagccctggagctgttcgacgagatgaaggagaggggcatcaagcccgacgtggtcacatacaccacactgatcgacggactgtgtaaagccggcgacgtggacgaagccctcgagctgttcaaagagatgcggagcaagggcgtgaagcccaacgtggtcacatacaacaccctgatcgacggcctgtgcaaggccggcagactggatgaggccgaggagctgctggaggagatggaggagaagggcatcaagcccgacgtggtcacatacaacaccctgatcgacggcctgtgcaaggccggcagactggacgaggccgaagagctgctggaggagatggaggagaagggcatcaagcccgacgtggtcacatacaacaccctgatcgacggcctgtgcaaggccggcagactggacgaagccgaggagctgctggaggagatggaggagaagggcatcaagcccgacgtggtcacatacaacaccctgatcgacggcctgtgcaagagcggcaagatcgaggaggccctgaagctgttcaaggagatggaggagaagggcatcacccccagcgagctgacctacaacaccctgatcagcggcctgggcaaggccggcagagccagagacccccccgtgctcagtagcggctccggcggcagcgggggaggcgggcatcatcaccatcaccacggacgctag

SEQ ID NO: 214 - DNA, 2610 bp, Artificial Sequence
  Synthesized Sequence
atggccggagtgttcacactggaggacttcgtgggcgactggagacagaccgccggctacaacctggaccaggtgctggagcagggcggagtgagcagcctgtttcagaacctgggcgtgagcgtcacccccatccagaggatcgtgctgtccggcgagaatggcctgaagatcgacatccacgtcatcatcccctacgagggcctgagcggcgatcagatgggccagatcgagaagatcttcaaggtggtgtatcccgtcgacgaccaccacttcaaggtgatcctgcattacggcaccctcgtgatcgacggcgtgacccctaacatgatcgactacttcggcaggccctacgagggaatcgccgtgttcgacggaaagaagatcaccgtgaccggcaccctgtggaacggaaacaagatcatcgacgagaggctgatcaaccccgacggctccctgctgttcagggtgaccatcaatggcgtgaccggctggagactgtgcgagagaatcctggccggaggcggaggaagcctcgtgcccagaggatccggcggaggcggctccagccggctccatatgggaaactccgtggtcacatacaccacactgatcgacggactgtgtaaagccggcgacgtggacgaagccctcgagctgttcaaagagatgcggagcaagggcgtgaagcccaacgtggtcacatacaccaccctgatcgacggcctgtgcaaggccggcaaggtggatgaggccctggagctgttcgacgagatgaaggagaggggcatcaagcccgacgtggtgacatacaacaccctgatcgacggcctgtgcaagagcggcaagatcgaggaggccctgaagctgttcaaggagatggaggagaagggcatcacccccagcgtggtcacatacaccacactgatcgacggactgtgtaaagccggcgacgtggacgaagccctcgagctgttcaaagagatgcggagcaagggcgtgaagcccaacgtggttacatacaccaccctgatcgacggcctgtgcaaggccggcaaagtggacgaggccctggagctgttcgacgagatgaaggagaggggcatcaagcccgacgtggtcacatacaacaccctgatcgacggcctgtgcaagagcggcaagatcgaggaggccctgaagctgttcaaggagatggaggagaagggcatcacccccagcgtggttacatacaccacactgatcgacggactgtgtaaagccggcgacgtggacgaagccctcgagctgttcaaagagatgcggagcaagggcgtgaagcccaacgtggtcacatacaccaccctgatcgacggcctgtgcaaggccggcaaggtggatgaggccctggagctgttcgacgagatgaaggagaggggcatcaagcccgacgtggtgacatacaacaccctgatcgacggcctgtgcaagagcggcaagatcgaggaggccctgaagctgttcaaggagatggaggagaagggcatcacccccagcgtggtcacatacaccacactgatcgacggactgtgtaaagccggcgacgtggacgaagccctcgagctgttcaaagagatgcggagcaagggcgtgaagcccaacgtggttacatacaccaccctgatcgacggcctgtgcaaggccggcaaagtggacgaggccctggagctgttcgacgagatgaaggagaggggcatcaagcccgacgtggtcacatacaacaccctgatcgacggcctgtgcaagagcggcaagatcgaggaggccctgaagctgttcaaggagatggaggagaagggcatcacccccagcgtggtcacatacaccacactgatcgacggactgtgtaaagccggcgacgtggacgaagccctcgagctgttcaaagagatgcggagcaagggcgtgaagcccaacgtggtcacatacaccaccctgatcgacggcctgtgcaaggccggcaaggtggatgaggccctggagctgttcgacgagatgaaggagaggggcatcaagcccgacgtggttacatacaacaccctgatcgacggcctgtgcaagagcggcaagatcgaggaggccctgaagctgttcaaggagatggaggagaagggcatcacccccagcgtggtcacatacaccacactgatcgacggactgtgtaaagccggcgacgtggacgaagccctcgagctgttcaaagagatgcggagcaagggcgtgaagcccaacgtggtgacatacaccaccctgatcgacggcctgtgcaaggccggcaaagtggacgaggccctggagctgttcgacgagatgaaggagaggggcatcaagcccgacgtggtcacatacaacaccctgatcgacggcctgtgcaagagcggcaagatcgaggaggccctgaagctgttcaaggagatggaggagaagggcatcacccccagcgagctgacctacaacaccctgatcagcggcctgggcaaggccggcagagccagagacccccccgtgctcagtagcggctccggcggcagcgggggaggcgggcatcatcaccatcaccacggacgctag

SEQ ID NO: 215 - DNA, 2610 bp, Artificial Sequence
  Synthesized Sequence
atggccggagtgttcacactggaggacttcgtgggcgactggagacagaccgccggctacaacctggaccaggtgctggagcagggcggagtgagcagcctgtttcagaacctgggcgtgagcgtcacccccatccagaggatcgtgctgtccggcgagaatggcctgaagatcgacatccacgtcatcatcccctacgagggcctgagcggcgatcagatgggccagatcgagaagatcttcaaggtggtgtatcccgtcgacgaccaccacttcaaggtgatcctgcattacggcaccctcgtgatcgacggcgtgacccctaacatgatcgactacttcggcaggccctacgagggaatcgccgtgttcgacggaaagaagatcaccgtgaccggcaccctgtggaacggaaacaagatcatcgacgagaggctgatcaaccccgacggctccctgctgttcagggtgaccatcaatggcgtgaccggctggagactgtgcgagagaatcctggccggaggcggaggaagcctcgtgcccagaggatccggcggaggcggctccagccggctccatatgggaaactccgtggtcacatacaccaccctgatcgacggcctgtgcaaggccggcaaggtggacgaagccctggagctgttcgacgagatgaaggagaggggcatcaagcccgacgtggtcacatacaccaccctgatcgacggcctgtgcaaggccggcaaggtggatgaggccctggagctgttcgacgagatgaaggagaggggcatcaagcccgacgtggtcacatacaccaccctgatcgacggcctgtgcaaggccggcaaagtggacgaggccctggagctgttcgacgagatgaaggagaggggcatcaagcccgacgtggtcacatacaccaccctgatcgacggcctgtgcaaggccggcaaggtggacgaagccctggagctgttcgacgagatgaaggagaggggcatcaagcccgacgtggtcacatacaacaccctgatcgacggcctgtgcaaggccggcagactggacgaagccgaggagctgctggaggagatggaggagaagggcatcaagcccgacgtggtcacatacaccacactgatcgacggactgtgtaaagccggcgacgtggacgaagccctcgagctgttcaaagagatgcggagcaagggcgtgaagcccaacgtggtcacatacaccacactgatcgacggactgtgtaaagccggcgacgtggacgaagccctcgagctgttcaaagagatgcggagcaagggcgtgaagcccaacgtggtcacatacaccacactgatcgacggactgtgtaaagccggcgacgtggacgaagccctcgagctgttcaaagagatgcggagcaagggcgtgaagcccaacgtggtcacatacaacaccctgatcgacggcctgtgcaagagcggcaagatcgaggaggccctgaagctgttcaaggagatggaggagaagggcatcacccccagcgtggtcacatacaacaccctgatcgacggcctgtgcaaggccggcagactggatgaggccgaggagctgctggaggagatggaggagaagggcatcaagcccgacgtggtcacatacaccaccctgatcgacggcctgtgcaaggccggcaaagtggacgaggccctggagctgttcgacgagatgaaggagaggggcatcaagcccgacgtggtcacatacaccaccctgatcgacggcctgtgcaaggccggcaaggtggacgaagccctggagctgttcgacgagatgaaggagaggggcatcaagcccgacgtggtcacatacaccaccctgatcgacggcctgtgcaaggccggcaaggtggacgaagccctggagctgttcgacgagatgaaggagaggggcatcaagcccgacgtggtcacatacaccaccctgatcgacggcctgtgcaaggccggcaaggtggatgaggccctggagctgttcgacgagatgaaggagaggggcatcaagcccgacgtggtcacatacaacaccctgatcgacggcctgtgcaaggccggcagactggatgaggccgaggagctgctggaggagatggaggagaagggcatcaagcccgacgtggtcacatacaacaccctgatcgacggcctgtgcaagagcggcaagatcgaggaggccctgaagctgttcaaggagatggaggagaagggcatcacccccagcgtggtcacatacaccaccctgatcgacggcctgtgcaaggccggcaaggtggacgaagccctggagctgttcgacgagatgaaggagaggggcatcaagcccgacgtggtcacatacaacaccctgatcgacggcctgtgcaagagcggcaagatcgaggaggccctgaagctgttcaaggagatggaggagaagggcatcacccccagcgagctgacctacaacaccctgatcagcggcctgggcaaggccggcagagccagagacccccccgtgctcagtagcggctccggcggcagcgggggaggcgggcatcatcaccatcaccacggacgctag

SEQ ID NO: 216 - DNA, 2610 bp, Artificial Sequence
  Synthesized Sequence
atggccggagtgttcacactggaggacttcgtgggcgactggagacagaccgccggctacaacctggaccaggtgctggagcagggcggagtgagcagcctgtttcagaacctgggcgtgagcgtcacccccatccagaggatcgtgctgtccggcgagaatggcctgaagatcgacatccacgtcatcatcccctacgagggcctgagcggcgatcagatgggccagatcgagaagatcttcaaggtggtgtatcccgtcgacgaccaccacttcaaggtgatcctgcattacggcaccctcgtgatcgacggcgtgacccctaacatgatcgactacttcggcaggccctacgagggaatcgccgtgttcgacggaaagaagatcaccgtgaccggcaccctgtggaacggaaacaagatcatcgacgagaggctgatcaaccccgacggctccctgctgttcagggtgaccatcaatggcgtgaccggctggagactgtgcgagagaatcctggccggaggcggaggaagcctcgtgcccagaggatccggcggaggcggctccagccggctccatatgggaaactccgtggtcacatacaacaccctgatcgacggcctgtgcaaggccggcagactggacgaagccgaggagctgctggaggagatggaggagaagggcatcaagcccgacgtggtcacatacaacaccctgatcgacggcctgtgcaaggccggcagactggatgaggccgaggagctgctggaggagatggaggagaagggcatcaagcccgacgtggtcacatacaacaccctgatcgacggcctgtgcaaggccggcagactggatgaggccgaggagctgctggaggagatggaggagaagggcatcaagcccgacgtggtcacatacaccaccctgatcgacggcctgtgcaaggccggcaaggtggacgaagccctggagctgttcgacgagatgaaggagaggggcatcaagcccgacgtggtcacatacaacaccctgatcgacggcctgtgcaaggccggcagactggacgaagccgaggagctgctggaggagatggaggagaagggcatcaagcccgacgtggtcacatacaacaccctgatcgacggcctgtgcaaggccggcagactggatgaggccgaggagctgctggaggagatggaggagaagggcatcaagcccgacgtggtcacatacaacaccctgatcgacggcctgtgcaaggccggcagactggatgaggccgaggagctgctggaggagatggaggagaagggcatcaagcccgacgtggtcacatacaacaccctgatcgacggcctgtgcaagagcggcaagatcgaggaggccctgaagctgttcaaggagatggaggagaagggcatcacccccagcgtggtcacatacaccacactgatcgacggactgtgtaaagccggcgacgtggacgaagccctcgagctgttcaaagagatgcggagcaagggcgtgaagcccaacgtggtcacatacaccaccctgatcgacggcctgtgcaaggccggcaaggtggatgaggccctggagctgttcgacgagatgaaggagaggggcatcaagcccgacgtggtcacatacaccacactgatcgacggactgtgtaaagccggcgacgtggacgaagccctcgagctgttcaaagagatgcggagcaagggcgtgaagcccaacgtggtcacatacaccacactgatcgacggactgtgtaaagccggcgacgtggacgaagccctcgagctgttcaaagagatgcggagcaagggcgtgaagcccaacgtggtcacatacaacaccctgatcgacggcctgtgcaaggccggcagactggacgaagccgaggagctgctggaggagatggaggagaagggcatcaagcccgacgtggtcacatacaacaccctgatcgacggcctgtgcaagagcggcaagatcgaggaggccctgaagctgttcaaggagatggaggagaagggcatcacccccagcgtggtcacatacaacaccctgatcgacggcctgtgcaaggccggcagactggatgaggccgaggagctgctggaggagatggaggagaagggcatcaagcccgacgtggtcacatacaacaccctgatcgacggcctgtgcaagagcggcaagatcgaggaggccctgaagctgttcaaggagatggaggagaagggcatcacccccagcgtggtcacatacaccaccctgatcgacggcctgtgcaaggccggcaaggtggacgaagccctggagctgttcgacgagatgaaggagaggggcatcaagcccgacgtggtcacatacaccaccctgatcgacggcctgtgcaaggccggcaaggtggatgaggccctggagctgttcgacgagatgaaggagaggggcatcaagcccgacgagctgacctacaacaccctgatcagcggcctgggcaaggccggcagagccagagacccccccgtgctcagtagcggctccggcggcagcgggggaggcgggcatcatcaccatcaccacggacgctag

SEQ ID NO: 217 - DNA, 2610 bp, Artificial Sequence
  Synthesized Sequence
atggccggagtgttcacactggaggacttcgtgggcgactggagacagaccgccggctacaacctggaccaggtgctggagcagggcggagtgagcagcctgtttcagaacctgggcgtgagcgtcacccccatccagaggatcgtgctgtccggcgagaatggcctgaagatcgacatccacgtcatcatcccctacgagggcctgagcggcgatcagatgggccagatcgagaagatcttcaaggtggtgtatcccgtcgacgaccaccacttcaaggtgatcctgcattacggcaccctcgtgatcgacggcgtgacccctaacatgatcgactacttcggcaggccctacgagggaatcgccgtgttcgacggaaagaagatcaccgtgaccggcaccctgtggaacggaaacaagatcatcgacgagaggctgatcaaccccgacggctccctgctgttcagggtgaccatcaatggcgtgaccggctggagactgtgcgagagaatcctggccggaggcggaggaagcctcgtgcccagaggatccggcggaggcggctccagccggctccatatgggaaactccgtggtcacatacaccaccctgatcgacggcctgtgcaaggccggcaaggtggacgaagccctggagctgttcgacgagatgaaggagaggggcatcaagcccgacgtggtcacatacaccaccctgatcgacggcctgtgcaaggccggcaaggtggatgaggccctggagctgttcgacgagatgaaggagaggggcatcaagcccgacgtggtcacatacaacaccctgatcgacggcctgtgcaagagcggcaagatcgaggaggccctgaagctgttcaaggagatggaggagaagggcatcacccccagcgtggtcacatacaccacactgatcgacggactgtgtaaagccggcgacgtggacgaagccctcgagctgttcaaagagatgcggagcaagggcgtgaagcccaacgtggtcacatacaccacactgatcgacggactgtgtaaagccggcgacgtggacgaagccctcgagctgttcaaagagatgcggagcaagggcgtgaagcccaacgtggtcacatacaccacactgatcgacggactgtgtaaagccggcgacgtggacgaagccctcgagctgttcaaagagatgcggagcaagggcgtgaagcccaacgtggtcacatacaccacactgatcgacggactgtgtaaagccggcgacgtggacgaagccctcgagctgttcaaagagatgcggagcaagggcgtgaagcccaacgtggtcacatacaccacactgatcgacggactgtgtaaagccggcgacgtggacgaagccctcgagctgttcaaagagatgcggagcaagggcgtgaagcccaacgtggtcacatacaccaccctgatcgacggcctgtgcaaggccggcaaggtggacgaagccctggagctgttcgacgagatgaaggagaggggcatcaagcccgacgtggtcacatacaccacactgatcgacggactgtgtaaagccggcgacgtggacgaagccctcgagctgttcaaagagatgcggagcaagggcgtgaagcccaacgtggtcacatacaacaccctgatcgacggcctgtgcaaggccggcagactggatgaggccgaggagctgctggaggagatggaggagaagggcatcaagcccgacgtggtcacatacaacaccctgatcgacggcctgtgcaagagcggcaagatcgaggaggccctgaagctgttcaaggagatggaggagaagggcatcacccccagcgtggtcacatacaccacactgatcgacggactgtgtaaagccggcgacgtggacgaagccctcgagctgttcaaagagatgcggagcaagggcgtgaagcccaacgtggtcacatacaacaccctgatcgacggcctgtgcaagagcggcaagatcgaggaggccctgaagctgttcaaggagatggaggagaagggcatcacccccagcgtggtcacatacaacaccctgatcgacggcctgtgcaaggccggcagactggatgaggccgaggagctgctggaggagatggaggagaagggcatcaagcccgacgtggtcacatacaacaccctgatcgacggcctgtgcaagagcggcaagatcgaggaggccctgaagctgttcaaggagatggaggagaagggcatcacccccagcgtggtcacatacaccacactgatcgacggactgtgtaaagccggcgacgtggacgaagccctcgagctgttcaaagagatgcggagcaagggcgtgaagcccaacgtggtcacatacaacaccctgatcgacggcctgtgcaagagcggcaagatcgaggaggccctgaagctgttcaaggagatggaggagaagggcatcacccccagcgagctgacctacaacaccctgatcagcggcctgggcaaggccggcagagccagagacccccccgtgctcagtagcggctccggcggcagcgggggaggcgggcatcatcaccatcaccacggacgctag

SEQ ID NO: 218 - DNA, 2610 bp, Artificial Sequence
  Synthesized Sequence
atggccggagtgttcacactggaggacttcgtgggcgactggagacagaccgccggctacaacctggaccaggtgctggagcagggcggagtgagcagcctgtttcagaacctgggcgtgagcgtcacccccatccagaggatcgtgctgtccggcgagaatggcctgaagatcgacatccacgtcatcatcccctacgagggcctgagcggcgatcagatgggccagatcgagaagatcttcaaggtggtgtatcccgtcgacgaccaccacttcaaggtgatcctgcattacggcaccctcgtgatcgacggcgtgacccctaacatgatcgactacttcggcaggccctacgagggaatcgccgtgttcgacggaaagaagatcaccgtgaccggcaccctgtggaacggaaacaagatcatcgacgagaggctgatcaaccccgacggctccctgctgttcagggtgaccatcaatggcgtgaccggctggagactgtgcgagagaatcctggccggaggcggaggaagcctcgtgcccagaggatccggcggaggcggctccagccggctccatatgggaaactccgtggtcacatacaacaccctgatcgacggcctgtgcaagagcggcaagatcgaggaggccctgaagctgttcaaggagatggaggagaagggcatcacccccagcgtggtcacatacaccaccctgatcgacggcctgtgcaaggccggcaaggtggatgaggccctggagctgttcgacgagatgaaggagaggggcatcaagcccgacgtggtcacatacaccacactgatcgacggactgtgtaaagccggcgacgtggacgaagccctcgagctgttcaaagagatgcggagcaagggcgtgaagcccaacgtggtcacatacaacaccctgatcgacggcctgtgcaaggccggcagactggacgaggccgaagagctgctggaggagatggaggagaagggcatcaagcccgacgtggtcacatacaccaccctgatcgacggcctgtgcaaggccggcaaggtggacgaagccctggagctgttcgacgagatgaaggagaggggcatcaagcccgacgtggtcacatacaccaccctgatcgacggcctgtgcaaggccggcaaggtggatgaggccctggagctgttcgacgagatgaaggagaggggcatcaagcccgacgtggtcacatacaacaccctgatcgacggcctgtgcaagagcggcaagatcgaggaggccctgaagctgttcaaggagatggaggagaagggcatcacccccagcgtggtcacatacaacaccctgatcgacggcctgtgcaaggccggcagactggacgaggccgaagagctgctggaggagatggaggagaagggcatcaagcccgacgtggtcacatacaacaccctgatcgacggcctgtgcaagagcggcaagatcgaggaggccctgaagctgttcaaggagatggaggagaagggcatcacccccagcgtggtcacatacaacaccctgatcgacggcctgtgcaaggccggcagactggatgaggccgaggagctgctggaggagatggaggagaagggcatcaagcccgacgtggtcacatacaacaccctgatcgacggcctgtgcaaggccggcagactggatgaggccgaggagctgctggaggagatggaggagaagggcatcaagcccgacgtggtcacatacaacaccctgatcgacggcctgtgcaagagcggcaagatcgaggaggccctgaagctgttcaaggagatggaggagaagggcatcacccccagcgtggtcacatacaacaccctgatcgacggcctgtgcaaggccggcagactggacgaagccgaggagctgctggaggagatggaggagaagggcatcaagcccgacgtggtcacatacaacaccctgatcgacggcctgtgcaagagcggcaagatcgaggaggccctgaagctgttcaaggagatggaggagaagggcatcacccccagcgtggtcacatacaacaccctgatcgacggcctgtgcaagagcggcaagatcgaggaggccctgaagctgttcaaggagatggaggagaagggcatcacccccagcgtggtcacatacaccacactgatcgacggactgtgtaaagccggcgacgtggacgaagccctcgagctgttcaaagagatgcggagcaagggcgtgaagcccaacgtggtcacatacaacaccctgatcgacggcctgtgcaagagcggcaagatcgaggaggccctgaagctgttcaaggagatggaggagaagggcatcacccccagcgtggtcacatacaacaccctgatcgacggcctgtgcaaggccggcagactggatgaggccgaggagctgctggaggagatggaggagaagggcatcaagcccgacgagctgacctacaacaccctgatcagcggcctgggcaaggccggcagagccagagacccccccgtgctcagtagcggctccggcggcagcgggggaggcgggcatcatcaccatcaccacggacgctag

SEQ ID NO: 219 - DNA, 2610 bp, Artificial Sequence
  Synthesized Sequence
atggccggagtgttcacactggaggacttcgtgggcgactggagacagaccgccggctacaacctggaccaggtgctggagcagggcggagtgagcagcctgtttcagaacctgggcgtgagcgtcacccccatccagaggatcgtgctgtccggcgagaatggcctgaagatcgacatccacgtcatcatcccctacgagggcctgagcggcgatcagatgggccagatcgagaagatcttcaaggtggtgtatcccgtcgacgaccaccacttcaaggtgatcctgcattacggcaccctcgtgatcgacggcgtgacccctaacatgatcgactacttcggcaggccctacgagggaatcgccgtgttcgacggaaagaagatcaccgtgaccggcaccctgtggaacggaaacaagatcatcgacgagaggctgatcaaccccgacggctccctgctgttcagggtgaccatcaatggcgtgaccggctggagactgtgcgagagaatcctggccggaggcggaggaagcctcgtgcccagaggatccggcggaggcggctccagccggctccatatgggaaactccgtggtcacatacaacaccctgatcgacggcctgtgcaagagcggcaagatcgaggaggccctgaagctgttcaaggagatggaggagaagggcatcacccccagcgtggtcacatacaacaccctgatcgacggcctgtgcaagagcggcaagatcgaggaggccctgaagctgttcaaggagatggaggagaagggcatcacccccagcgtggtgacatacaccacactgatcgacggactgtgtaaagccggcgacgtggacgaagccctcgagctgttcaaagagatgcggagcaagggcgtgaagcccaacgtggtcacatacaccaccctgatcgacggcctgtgcaaggccggcaaggtggatgaggccctggagctgttcgacgagatgaaggagaggggcatcaagcccgacgtggttacatacaacaccctgatcgacggcctgtgcaaggccggcagactggatgaggccgaggagctgctggaggagatggaggagaagggcatcaagcccgacgtggtcacatacaacaccctgatcgacggcctgtgcaagagcggcaagatcgaggaggccctgaagctgttcaaggagatggaggagaagggcatcacccccagcgtggttacatacaacaccctgatcgacggcctgtgcaagagcggcaagatcgaggaggccctgaagctgttcaaggagatggaggagaagggcatcacccccagcgtggtcacatacaccacactgatcgacggactgtgtaaagccggcgacgtggacgaagccctcgagctgttcaaagagatgcggagcaagggcgtgaagcccaacgtggtgacatacaccacactgatcgacggactgtgtaaagccggcgacgtggacgaagccctcgagctgttcaaagagatgcggagcaagggcgtgaagcccaacgtggtcacatacaccaccctgatcgacggcctgtgcaaggccggcaaggtggatgaggccctggagctgttcgacgagatgaaggagaggggcatcaagcccgacgtggttacatacaacaccctgatcgacggcctgtgcaaggccggcagactggatgaggccgaggagctgctggaggagatggaggagaagggcatcaagcccgacgtggtcacatacaccaccctgatcgacggcctgtgcaaggccggcaaggtggatgaggccctggagctgttcgacgagatgaaggagaggggcatcaagcccgacgtggtcacatacaacaccctgatcgacggcctgtgcaaggccggcagactggatgaggccgaggagctgctggaggagatggaggagaagggcatcaagcccgacgtggtcacatacaccaccctgatcgacggcctgtgcaaggccggcaaggtggatgaggccctggagctgttcgacgagatgaaggagaggggcatcaagcccgacgtggttacatacaccaccctgatcgacggcctgtgcaaggccggcaaagtggacgaggccctggagctgttcgacgagatgaaggagaggggcatcaagcccgacgtggtcacatacaacaccctgatcgacggcctgtgcaagagcggcaagatcgaggaggccctgaagctgttcaaggagatggaggagaagggcatcacccccagcgtggtgacatacaacaccctgatcgacggcctgtgcaaggccggcagactggatgaggccgaggagctgctggaggagatggaggagaagggcatcaagcccgacgtggtcacatacaacaccctgatcgacggcctgtgcaagagcggcaagatcgaggaggccctgaagctgttcaaggagatggaggagaagggcatcacccccagcgagctgacctacaacaccctgatcagcggcctgggcaaggccggcagagccagagacccccccgtgctcagtagcggctccggcggcagcgggggaggcgggcatcatcaccatcaccacggacgctag

SEQ ID NO: 220 - DNA, 2610 bp, Artificial Sequence
  Synthesized Sequence
atggccggagtgttcacactggaggacttcgtgggcgactggagacagaccgccggctacaacctggaccaggtgctggagcagggcggagtgagcagcctgtttcagaacctgggcgtgagcgtcacccccatccagaggatcgtgctgtccggcgagaatggcctgaagatcgacatccacgtcatcatcccctacgagggcctgagcggcgatcagatgggccagatcgagaagatcttcaaggtggtgtatcccgtcgacgaccaccacttcaaggtgatcctgcattacggcaccctcgtgatcgacggcgtgacccctaacatgatcgactacttcggcaggccctacgagggaatcgccgtgttcgacggaaagaagatcaccgtgaccggcaccctgtggaacggaaacaagatcatcgacgagaggctgatcaaccccgacggctccctgctgttcagggtgaccatcaatggcgtgaccggctggagactgtgcgagagaatcctggccggaggcggaggaagcctcgtgcccagaggatccggcggaggcggctccagccggctccatatgggaaactccgtggtcacatacaacaccctgatcgacggcctgtgcaagagcggcaagatcgaggaggccctgaagctgttcaaggagatggaggagaagggcatcacccccagcgtggtcacatacaccacactgatcgacggactgtgtaaagccggcgacgtggacgaagccctcgagctgttcaaagagatgcggagcaagggcgtgaagcccaacgtggtgacatacaccaccctgatcgacggcctgtgcaaggccggcaaagtggacgaggccctggagctgttcgacgagatgaaggagaggggcatcaagcccgacgtggtcacatacaacaccctgatcgacggcctgtgcaagagcggcaagatcgaggaggccctgaagctgttcaaggagatggaggagaagggcatcacccccagcgtggttacatacaccacactgatcgacggactgtgtaaagccggcgacgtggacgaagccctcgagctgttcaaagagatgcggagcaagggcgtgaagcccaacgtggtcacatacaccaccctgatcgacggcctgtgcaaggccggcaaggtggatgaggccctggagctgttcgacgagatgaaggagaggggcatcaagcccgacgtggttacatacaacaccctgatcgacggcctgtgcaagagcggcaagatcgaggaggccctgaagctgttcaaggagatggaggagaagggcatcacccccagcgtggtcacatacaccacactgatcgacggactgtgtaaagccggcgacgtggacgaagccctcgagctgttcaaagagatgcggagcaagggcgtgaagcccaacgtggtgacatacaccaccctgatcgacggcctgtgcaaggccggcaaagtggacgaggccctggagctgttcgacgagatgaaggagaggggcatcaagcccgacgtggtcacatacaacaccctgatcgacggcctgtgcaagagcggcaagatcgaggaggccctgaagctgttcaaggagatggaggagaagggcatcacccccagcgtggttacatacaccacactgatcgacggactgtgtaaagccggcgacgtggacgaagccctcgagctgttcaaagagatgcggagcaagggcgtgaagcccaacgtggtcacatacaccaccctgatcgacggcctgtgcaaggccggcaaggtggatgaggccctggagctgttcgacgagatgaaggagaggggcatcaagcccgacgtggtcacatacaacaccctgatcgacggcctgtgcaagagcggcaagatcgaggaggccctgaagctgttcaaggagatggaggagaagggcatcacccccagcgtggtcacatacaccacactgatcgacggactgtgtaaagccggcgacgtggacgaagccctcgagctgttcaaagagatgcggagcaagggcgtgaagcccaacgtggttacatacaccaccctgatcgacggcctgtgcaaggccggcaaagtggacgaggccctggagctgttcgacgagatgaaggagaggggcatcaagcccgacgtggtcacatacaacaccctgatcgacggcctgtgcaagagcggcaagatcgaggaggccctgaagctgttcaaggagatggaggagaagggcatcacccccagcgtggtgacatacaccacactgatcgacggactgtgtaaagccggcgacgtggacgaagccctcgagctgttcaaagagatgcggagcaagggcgtgaagcccaacgtggtcacatacaccaccctgatcgacggcctgtgcaaggccggcaaggtggatgaggccctggagctgttcgacgagatgaaggagaggggcatcaagcccgacgagctgacctacaacaccctgatcagcggcctgggcaaggccggcagagccagagacccccccgtgctcagtagcggctccggcggcagcgggggaggcgggcatcatcaccatcaccacggacgctag

SEQ ID NO: 221 - DNA, 30 bp, Artificial Sequence
  Synthesized Sequence
gacaugcgugaaggugacagcagucgacug

SEQ ID NO: 222 - DNA, 30 bp, Artificial Sequence
  Synthesized Sequence
gacaugccgggccuccgguguucuggacug

SEQ ID NO: 223 - DNA, 30 bp, Artificial Sequence
  Synthesized Sequence
gacaugccuuaucagacugauguuggacug

SEQ ID NO: 224 - DNA, 30 bp, Artificial Sequence
  Synthesized Sequence
gacaugcacguggaugaaguugguggacug

SEQ ID NO: 225 - DNA, 30 bp, Artificial Sequence
  Synthesized Sequence
gacaugcagcuuaucagacugaugugacug

SEQ ID NO: 226 - DNA, 30 bp, Artificial Sequence
  Synthesized Sequence
gacaugcgcuuaucagacugauguugacug

SEQ ID NO: 227 - DNA, 30 bp, Artificial Sequence
  Synthesized Sequence
gacaugccauguucgaauucguuuugacug

SEQ ID NO: 228 - DNA, 30 bp, Artificial Sequence
  Synthesized Sequence
gacaugcugcugggcaaggugaacggacug

SEQ ID NO: 229 - DNA, 30 bp, Artificial Sequence
  Synthesized Sequence
gacaugcuagcuuaucagacugauggacug

SEQ ID NO: 230 - DNA, 30 bp, Artificial Sequence
  Synthesized Sequence
gacaugcuuuuauugugcuauggcagacug

SEQ ID NO: 231 - DNA, 30 bp, Artificial Sequence
  Synthesized Sequence
gacaugcuccucaccggugacuggugacug

SEQ ID NO: 232 - DNA, 30 bp, Artificial Sequence
  Synthesized Sequence
gacaugcuguuuugguuaauaaaacgacug

SEQ ID NO: 233 - DNA, 30 bp, Artificial Sequence
  Synthesized Sequence
gacaugcccuguuaugugugugauugacug

SEQ ID NO: 234 - DNA, 30 bp, Artificial Sequence
  Synthesized Sequence
gacaugccugagaguuggcaugaaugacug

SEQ ID NO: 235 - DNA, 30 bp, Artificial Sequence
  Synthesized Sequence
gacaugccaaccaugcaucuuggaagacug

SEQ ID NO: 236 - DNA, 30 bp, Artificial Sequence
  Synthesized Sequence
gacaugcgugcugauuccuagacuugacug

SEQ ID NO: 237 - DNA, 30 bp, Artificial Sequence
  Synthesized Sequence
gacaugccgcugagcugcugccugggacug

SEQ ID NO: 238 - DNA, 30 bp, Artificial Sequence
  Synthesized Sequence
gacaugcugugcuauggcaaaucuggacug

SEQ ID NO: 239 - DNA, 30 bp, Artificial Sequence
  Synthesized Sequence
gacaugcuuguuugcuuugcuaaaggacug

SEQ ID NO: 240 - DNA, 30 bp, Artificial Sequence
  Synthesized Sequence
gacaugcacgucccgggaggcggcagacug

SEQ ID NO: 241 - DNA, 30 bp, Artificial Sequence
  Synthesized Sequence
gacaugcggcggggcacugugcguggacug

SEQ ID NO: 242 - DNA, 30 bp, Artificial Sequence
  Synthesized Sequence
gacaugccguguggaucggcggcucgacug

SEQ ID NO: 243 - DNA, 30 bp, Artificial Sequence
  Synthesized Sequence
gacaugcuccaggcugugcuaucccgacug

SEQ ID NO: 244 - DNA, 30 bp, Artificial Sequence
  Synthesized Sequence
gacaugcucaggauuuaaaaacugggacug

SEQ ID NO: 245 - DNA, 30 bp, Artificial Sequence
  Synthesized Sequence
gacaugcucuagaauccuaaaggcagacug

SEQ ID NO: 246 - DNA, 30 bp, Artificial Sequence
  Synthesized Sequence
gacaugcuuguggccuuuuucuccugacug

SEQ ID NO: 247 - DNA, 30 bp, Artificial Sequence
  Synthesized Sequence
gacaugcugguguaucuugucuuuagacug

SEQ ID NO: 248 - DNA, 30 bp, Artificial Sequence
  Synthesized Sequence
gacaugcgauaucgccgcgcucgucgacug

SEQ ID NO: 249 - DNA, 30 bp, Artificial Sequence
  Synthesized Sequence
gacaugccggcggcggcggcggcgggacug

SEQ ID NO: 250 - DNA, 30 bp, Artificial Sequence
  Synthesized Sequence
gacaugcacaacggcuccggcaugugacug

SEQ ID NO: 251 - DNA, 30 bp, Artificial Sequence
  Synthesized Sequence
gacaugcggcggcggcggcggcggcgacug

SEQ ID NO: 252 - DNA, 30 bp, Artificial Sequence
  Synthesized Sequence
gacaugcagccauacuauuuauguggacug

SEQ ID NO: 253 - DNA, 30 bp, Artificial Sequence
  Synthesized Sequence
gacaugcugaaagcgaaaguaaagcgacug

SEQ ID NO: 254 - DNA, 30 bp, Artificial Sequence
  Synthesized Sequence
gacaugcgcggcggcggcggcggcggacug

SEQ ID NO: 255 - DNA, 30 bp, Artificial Sequence
  Synthesized Sequence
gacaugccuggaucuuagcaacgucgacug

SEQ ID NO: 256 - DNA, 30 bp, Artificial Sequence
  Synthesized Sequence
gacaugcgucuauuuucccacccuugacug

SEQ ID NO: 257 - DNA, 30 bp, Artificial Sequence
  Synthesized Sequence
gacaugcuugguaucaagguuacaagacug

SEQ ID NO: 258 - DNA, 30 bp, Artificial Sequence
  Synthesized Sequence
gacaugcgcucguggagaccaucuugacug

SEQ ID NO: 259 - DNA, 30 bp, Artificial Sequence
  Synthesized Sequence
gacaugcggagcgagcaucccccaagacug

SEQ ID NO: 260 - DNA, 30 bp, Artificial Sequence
  Synthesized Sequence
gacaugccuuuuuucuggcuaccaagacug

SEQ ID NO: 261 - DNA, 30 bp, Artificial Sequence
  Synthesized Sequence
gacaugccuccuccugagcgcaagugacug

SEQ ID NO: 262 - DNA, 30 bp, Artificial Sequence
  Synthesized Sequence
gacaugccgccucuggccguaccacgacug

SEQ ID NO: 263 - DNA, 30 bp, Artificial Sequence
  Synthesized Sequence
gacaugcgcagcagcagcagcagcagacug

SEQ ID NO: 264 - DNA, 30 bp, Artificial Sequence
  Synthesized Sequence
gacaugcgcgccuauagcacucgaagacug

SEQ ID NO: 265 - DNA, 30 bp, Artificial Sequence
  Synthesized Sequence
gacaugcuucacacucgaagauuucgacug

SEQ ID NO: 266 - DNA, 30 bp, Artificial Sequence
  Synthesized Sequence
gacaugcagcagcagcagcagcagcgacug

SEQ ID NO: 267 - DNA, 30 bp, Artificial Sequence
  Synthesized Sequence
gacaugcgggguaaacuggggucgcgacug

SEQ ID NO: 268 - DNA, 30 bp, Artificial Sequence
  Synthesized Sequence
gacaugcuuuguuucagaaucucgggacug

SEQ ID NO: 269 - DNA, 30 bp, Artificial Sequence
  Synthesized Sequence
gacaugcggcaaaaagaucacucacgacug

SEQ ID NO: 270 - DNA, 30 bp, Artificial Sequence
  Synthesized Sequence
gacaugccgauggcucuucuccacugacug

SEQ ID NO: 271 - DNA, 30 bp, Artificial Sequence
  Synthesized Sequence
gacaugcccaguccaaguguggcucgacug

SEQ ID NO: 272 - DNA, 30 bp, Artificial Sequence
  Synthesized Sequence
gacaugccagcagcagcagcagcaggacug

SEQ ID NO: 273 - DNA, 18 bp, Artificial Sequence
  Synthesized Sequence
gaaugaacucuuccggga

SEQ ID NO: 274 - DNA, 18 bp, Artificial Sequence
  Synthesized Sequence
gaaugaacucuuccggga

SEQ ID NO: 275 - DNA, 18 bp, Artificial Sequence
  Synthesized Sequence
ucuagaauccuaaaggca

SEQ ID NO: 276 - DNA, 18 bp, Artificial Sequence
  Synthesized Sequence
ucuagaauccuaaaggca

SEQ ID NO: 277 - DNA, 18 bp, Artificial Sequence
  Synthesized Sequence
cugagucauaaccagccu

SEQ ID NO: 278 - DNA, 18 bp, Artificial Sequence
  Synthesized Sequence
cugagucauaaccagccu

SEQ ID NO: 279 - DNA, 18 bp, Artificial Sequence
  Synthesized Sequence
gucagaggguucuggauu

SEQ ID NO: 280 - DNA, 18 bp, Artificial Sequence
  Synthesized Sequence
gucagaggguucuggauu

SEQ ID NO: 281 - DNA, 18 bp, Artificial Sequence
  Synthesized Sequence
gugcugauuccuagacuu

SEQ ID NO: 282 - DNA, 18 bp, Artificial Sequence
  Synthesized Sequence
gugcugauuccuagacuu

SEQ ID NO: 283 - DNA, 18 bp, Artificial Sequence
  Synthesized Sequence
gacucaggaaucggcucu

SEQ ID NO: 284 - DNA, 18 bp, Artificial Sequence
  Synthesized Sequence
gacucaggaaucggcucu

SEQ ID NO: 285 - DNA, 18 bp, Artificial Sequence
  Synthesized Sequence
caacaucaaagacaccau

SEQ ID NO: 286 - DNA, 18 bp, Artificial Sequence
  Synthesized Sequence
caacaucaaagacaccau

SEQ ID NO: 287 - DNA, 18 bp, Artificial Sequence
  Synthesized Sequence
gagaggaagccugagagu

SEQ ID NO: 288 - DNA, 18 bp, Artificial Sequence
  Synthesized Sequence
gagaggaagccugagagu

SEQ ID NO: 289 - DNA, 18 bp, Artificial Sequence
  Synthesized Sequence
cugagaguuggcaugaau

SEQ ID NO: 290 - DNA, 18 bp, Artificial Sequence
  Synthesized Sequence
cugagaguuggcaugaau

SEQ ID NO: 291 - DNA, 18 bp, Artificial Sequence
  Synthesized Sequence
ccuguuaugugugugauu

SEQ ID NO: 292 - DNA, 18 bp, Artificial Sequence
  Synthesized Sequence
ccuguuaugugugugauu

SEQ ID NO: 293 - DNA, 18 bp, Artificial Sequence
  Synthesized Sequence
caaccaugcaucuuggaa

SEQ ID NO: 294 - DNA, 18 bp, Artificial Sequence
  Synthesized Sequence
caaccaugcaucuuggaa

SEQ ID NO: 295 - DNA, 18 bp, Artificial Sequence
  Synthesized Sequence
agccauacuauuuaugug

SEQ ID NO: 296 - DNA, 18 bp, Artificial Sequence
  Synthesized Sequence
agccauacuauuuaugug

SEQ ID NO: 297 - DNA, 18 bp, Artificial Sequence
  Synthesized Sequence
gcgccuauagcacucgaa

SEQ ID NO: 298 - DNA, 18 bp, Artificial Sequence
  Synthesized Sequence
gcgccuauagcacucgaa

SEQ ID NO: 299 - protein, 764 aa, Artificial Sequence
  Synthesized Sequence
MAGVFTLEDFVGDWRQTAGYNLDQVLEQGGVSSLFQNLGVSVTPIQRIVLSGENGLKIDIHVIIPYEGLSGDQMGQIEKIFKVVYPVDDHHFKVILHYGTLVIDGVTPNMIDYFGRPYEGIAVFDGKKITVTGTLWNGNKIIDERLINPDGSLLFRVTINGVTGWRLCERILAGGGGSLVPRGSGGGGSSRLHMGNSVVTYNTLIDGLCKAGRLDEAEELLEEMEEKGIKPDVVTYTTLIDGLCKAGKVDEALELFDEMKERGIKPDVVTYTTLIDGLCKAGDVDEALELFKEMRSKGVKPNVVTYTTLIDGLCKAGDVDEALELFKEMRSKGVKPNVVTYNTLIDGLCKSGKIEEALKLFKEMEEKGITPSVVTYNTLIDGLCKAGRLDEAEELLEEMEEKGIKPDVVTYNTLIDGLCKSGKIEEALKLFKEMEEKGITPSVVTYNTLIDGLCKAGRLDEAEELLEEMEEKGIKPDVVTYNTLIDGLCKAGRLDEAEELLEEMEEKGIKPDVVTYNTLIDGLCKSGKIEEALKLFKEMEEKGITPSVVTYNTLIDGLCKSGKIEEALKLFKEMEEKGITPSVVTYTTLIDGLCKAGKVDEALELFDEMKERGIKPDVVTYTTLIDGLCKAGKVDEALELFDEMKERGIKPDVVTYTTLIDGLCKAGKVDEALELFDEMKERGIKPDVVTYTTLIDGLCKAGDVDEALELFKEMRSKGVKPNELTYNTLISGLGKAGRARDPPVLSSGSGGSGGGGHHHHHHGR

SEQ ID NO: 300 - protein, 659 aa, Artificial Sequence
  Synthesized Sequence
MAGVFTLEDFVGDWRQTAGYNLDQVLEQGGVSSLFQNLGVSVTPIQRIVLSGENGLKIDIHVIIPYEGLSGDQMGQIEKIFKVVYPVDDHHFKVILHYGTLVIDGVTPNMIDYFGRPYEGIAVFDGKKITVTGTLWNGNKIIDERLINPDGSLLFRVTINGVTGWRLCERILAGGGGSLVPRGSGGGGSSRLHMGNSVVTYTTLIDGLCKAGDVDEALELFKEMRSKGVKPNVVTYNTLIDGLCKSGKIEEALKLFKEMEEKGITPSVVTYNTLIDGLCKAGRLDEAEELLEEMEEKGIKPDVVTYNTLIDGLCKSGKIEEALKLFKEMEEKGITPSVVTYNTLIDGLCKAGRLDEAEELLEEMEEKGIKPDVVTYNTLIDGLCKAGRLDEAEELLEEMEEKGIKPDVVTYNTLIDGLCKSGKIEEALKLFKEMEEKGITPSVVTYNTLIDGLCKSGKIEEALKLFKEMEEKGITPSVVTYTTLIDGLCKAGKVDEALELFDEMKERGIKPDVVTYTTLIDGLCKAGKVDEALELFDEMKERGIKPDVVTYTTLIDGLCKAGKVDEALELFDEMKERGIKPDVVTYTTLIDGLCKAGDVDEALELFKEMRSKGVKPNELTYNTLISGLGKAGRARDPPVLSSGSGGSGGGGHHHHHHGR

SEQ ID NO: 301 - protein, 764 aa, Artificial Sequence
  Synthesized Sequence
MAGVFTLEDFVGDWRQTAGYNLDQVLEQGGVSSLFQNLGVSVTPIQRIVLSGENGLKIDIHVIIPYEGLSGDQMGQIEKIFKVVYPVDDHHFKVILHYGTLVIDGVTPNMIDYFGRPYEGIAVFDGKKITVTGTLWNGNKIIDERLINPDGSLLFRVTINGVTGWRLCERILAGGGGSLVPRGSGGGGSSRLHMGNSVVTYTTLIDGLCKAGDVDEALELFKEMRSKGVKPNVVTYTTLIDGLCKAGKVDEALELFDEMKERGIKPDVVTYTTLIDGLCKAGDVDEALELFKEMRSKGVKPNVVTYTTLIDGLCKAGDVDEALELFKEMRSKGVKPNVVTYNTLIDGLCKAGRLDEAEELLEEMEEKGIKPDVVTYNTLIDGLCKSGKIEEALKLFKEMEEKGITPSVVTYNTLIDGLCKSGKIEEALKLFKEMEEKGITPSVVTYNTLIDGLCKAGRLDEAEELLEEMEEKGIKPDVVTYTTLIDGLCKAGDVDEALELFKEMRSKGVKPNVVTYTTLIDGLCKAGDVDEALELFKEMRSKGVKPNVVTYTTLIDGLCKAGDVDEALELFKEMRSKGVKPNVVTYTTLIDGLCKAGKVDEALELFDEMKERGIKPDVVTYTTLIDGLCKAGKVDEALELFDEMKERGIKPDVVTYNTLIDGLCKSGKIEEALKLFKEMEEKGITPSVVTYTTLIDGLCKAGDVDEALELFKEMRSKGVKPNELTYNTLISGLGKAGRARDPPVLSSGSGGSGGGGHHHHHHGR

SEQ ID NO: 302 - protein, 659 aa, Artificial Sequence
  Synthesized Sequence
MAGVFTLEDFVGDWRQTAGYNLDQVLEQGGVSSLFQNLGVSVTPIQRIVLSGENGLKIDIHVIIPYEGLSGDQMGQIEKIFKVVYPVDDHHFKVILHYGTLVIDGVTPNMIDYFGRPYEGIAVFDGKKITVTGTLWNGNKIIDERLINPDGSLLFRVTINGVTGWRLCERILAGGGGSLVPRGSGGGGSSRLHMGNSVVTYTTLIDGLCKAGDVDEALELFKEMRSKGVKPNVVTYNTLIDGLCKAGRLDEAEELLEEMEEKGIKPDVVTYNTLIDGLCKSGKIEEALKLFKEMEEKGITPSVVTYNTLIDGLCKSGKIEEALKLFKEMEEKGITPSVVTYNTLIDGLCKAGRLDEAEELLEEMEEKGIKPDVVTYTTLIDGLCKAGDVDEALELFKEMRSKGVKPNVVTYTTLIDGLCKAGDVDEALELFKEMRSKGVKPNVVTYTTLIDGLCKAGDVDEALELFKEMRSKGVKPNVVTYTTLIDGLCKAGKVDEALELFDEMKERGIKPDVVTYTTLIDGLCKAGKVDEALELFDEMKERGIKPDVVTYNTLIDGLCKSGKIEEALKLFKEMEEKGITPSVVTYTTLIDGLCKAGDVDEALELFKEMRSKGVKPNELTYNTLISGLGKAGRARDPPVLSSGSGGSGGGGHHHHHHGR

SEQ ID NO: 303 - protein, 764 aa, Artificial Sequence
  Synthesized Sequence
MAGVFTLEDFVGDWRQTAGYNLDQVLEQGGVSSLFQNLGVSVTPIQRIVLSGENGLKIDIHVIIPYEGLSGDQMGQIEKIFKVVYPVDDHHFKVILHYGTLVIDGVTPNMIDYFGRPYEGIAVFDGKKITVTGTLWNGNKIIDERLINPDGSLLFRVTINGVTGWRLCERILAGGGGSLVPRGSGGGGSSRLHMGNSVVTYTTLIDGLCKAGDVDEALELFKEMRSKGVKPNVVTYTTLIDGLCKAGKVDEALELFDEMKERGIKPDVVTYNTLIDGLCKAGRLDEAEELLEEMEEKGIKPDVVTYNTLIDGLCKSGKIEEALKLFKEMEEKGITPSVVTYTTLIDGLCKAGDVDEALELFKEMRSKGVKPNVVTYNTLIDGLCKAGRLDEAEELLEEMEEKGIKPDVVTYTTLIDGLCKAGDVDEALELFKEMRSKGVKPNVVTYTTLIDGLCKAGDVDEALELFKEMRSKGVKPNVVTYNTLIDGLCKSGKIEEALKLFKEMEEKGITPSVVTYNTLIDGLCKSGKIEEALKLFKEMEEKGITPSVVTYTTLIDGLCKAGDVDEALELFKEMRSKGVKPNVVTYTTLIDGLCKAGKVDEALELFDEMKERGIKPDVVTYNTLIDGLCKSGKIEEALKLFKEMEEKGITPSVVTYNTLIDGLCKSGKIEEALKLFKEMEEKGITPSVVTYNTLIDGLCKAGRLDEAEELLEEMEEKGIKPDELTYNTLISGLGKAGRARDPPVLSSGSGGSGGGGHHHHHHGR

SEQ ID NO: 304 - protein, 659 aa, Artificial Sequence
  Synthesized Sequence
MAGVFTLEDFVGDWRQTAGYNLDQVLEQGGVSSLFQNLGVSVTPIQRIVLSGENGLKIDIHVIIPYEGLSGDQMGQIEKIFKVVYPVDDHHFKVILHYGTLVIDGVTPNMIDYFGRPYEGIAVFDGKKITVTGTLWNGNKIIDERLINPDGSLLFRVTINGVTGWRLCERILAGGGGSLVPRGSGGGGSSRLHMGNSVVTYNTLIDGLCKSGKIEEALKLFKEMEEKGITPSVVTYTTLIDGLCKAGDVDEALELFKEMRSKGVKPNVVTYNTLIDGLCKAGRLDEAEELLEEMEEKGIKPDVVTYTTLIDGLCKAGDVDEALELFKEMRSKGVKPNVVTYTTLIDGLCKAGDVDEALELFKEMRSKGVKPNVVTYNTLIDGLCKSGKIEEALKLFKEMEEKGITPSVVTYNTLIDGLCKSGKIEEALKLFKEMEEKGITPSVVTYTTLIDGLCKAGDVDEALELFKEMRSKGVKPNVVTYTTLIDGLCKAGKVDEALELFDEMKERGIKPDVVTYNTLIDGLCKSGKIEEALKLFKEMEEKGITPSVVTYNTLIDGLCKSGKIEEALKLFKEMEEKGITPSVVTYNTLIDGLCKAGRLDEAEELLEEMEEKGIKPDELTYNTLISGLGKAGRARDPPVLSSGSGGSGGGGHHHHHHGR

SEQ ID NO: 305 - protein, 764 aa, Artificial Sequence
  Synthesized Sequence
MAGVFTLEDFVGDWRQTAGYNLDQVLEQGGVSSLFQNLGVSVTPIQRIVLSGENGLKIDIHVIIPYEGLSGDQMGQIEKIFKVVYPVDDHHFKVILHYGTLVIDGVTPNMIDYFGRPYEGIAVFDGKKITVTGTLWNGNKIIDERLINPDGSLLFRVTINGVTGWRLCERILAGGGGSLVPRGSGGGGSSRLHMGNSVVTYTTLIDGLCKAGDVDEALELFKEMRSKGVKPNVVTYTTLIDGLCKAGKVDEALELFDEMKERGIKPDVVTYTTLIDGLCKAGDVDEALELFKEMRSKGVKPNVVTYTTLIDGLCKAGKVDEALELFDEMKERGIKPDVVTYTTLIDGLCKAGKVDEALELFDEMKERGIKPDVVTYTTLIDGLCKAGKVDEALELFDEMKERGIKPDVVTYNTLIDGLCKAGRLDEAEELLEEMEEKGIKPDVVTYNTLIDGLCKAGRLDEAEELLEEMEEKGIKPDVVTYNTLIDGLCKSGKIEEALKLFKEMEEKGITPSVVTYNTLIDGLCKAGRLDEAEELLEEMEEKGIKPDVVTYTTLIDGLCKAGKVDEALELFDEMKERGIKPDVVTYTTLIDGLCKAGKVDEALELFDEMKERGIKPDVVTYTTLIDGLCKAGDVDEALELFKEMRSKGVKPNVVTYNTLIDGLCKAGRLDEAEELLEEMEEKGIKPDVVTYNTLIDGLCKAGRLDEAEELLEEMEEKGIKPDELTYNTLISGLGKAGRARDPPVLSSGSGGSGGGGHHHHHHGR

SEQ ID NO: 306 - protein, 659 aa, Artificial Sequence
  Synthesized Sequence
MAGVFTLEDFVGDWRQTAGYNLDQVLEQGGVSSLFQNLGVSVTPIQRIVLSGENGLKIDIHVIIPYEGLSGDQMGQIEKIFKVVYPVDDHHFKVILHYGTLVIDGVTPNMIDYFGRPYEGIAVFDGKKITVTGTLWNGNKIIDERLINPDGSLLFRVTINGVTGWRLCERILAGGGGSLVPRGSGGGGSSRLHMGNSVVTYTTLIDGLCKAGKVDEALELFDEMKERGIKPDVVTYTTLIDGLCKAGKVDEALELFDEMKERGIKPDVVTYTTLIDGLCKAGKVDEALELFDEMKERGIKPDVVTYNTLIDGLCKAGRLDEAEELLEEMEEKGIKPDVVTYNTLIDGLCKAGRLDEAEELLEEMEEKGIKPDVVTYNTLIDGLCKSGKIEEALKLFKEMEEKGITPSVVTYNTLIDGLCKAGRLDEAEELLEEMEEKGIKPDVVTYTTLIDGLCKAGKVDEALELFDEMKERGIKPDVVTYTTLIDGLCKAGKVDEALELFDEMKERGIKPDVVTYTTLIDGLCKAGDVDEALELFKEMRSKGVKPNVVTYNTLIDGLCKAGRLDEAEELLEEMEEKGIKPDVVTYNTLIDGLCKAGRLDEAEELLEEMEEKGIKPDELTYNTLISGLGKAGRARDPPVLSSGSGGSGGGGHHHHHHGR

SEQ ID NO: 307 - protein, 764 aa, Artificial Sequence
  Synthesized Sequence
MAGVFTLEDFVGDWRQTAGYNLDQVLEQGGVSSLFQNLGVSVTPIQRIVLSGENGLKIDIHVIIPYEGLSGDQMGQIEKIFKVVYPVDDHHFKVILHYGTLVIDGVTPNMIDYFGRPYEGIAVFDGKKITVTGTLWNGNKIIDERLINPDGSLLFRVTINGVTGWRLCERILAGGGGSLVPRGSGGGGSSRLHMGNSVVTYNTLIDGLCKSGKIEEALKLFKEMEEKGITPSVVTYNTLIDGLCKAGRLDEAEELLEEMEEKGIKPDVVTYTTLIDGLCKAGKVDEALELFDEMKERGIKPDVVTYTTLIDGLCKAGDVDEALELFKEMRSKGVKPNVVTYNTLIDGLCKAGRLDEAEELLEEMEEKGIKPDVVTYNTLIDGLCKAGRLDEAEELLEEMEEKGIKPDVVTYNTLIDGLCKSGKIEEALKLFKEMEEKGITPSVVTYNTLIDGLCKSGKIEEALKLFKEMEEKGITPSVVTYNTLIDGLCKAGRLDEAEELLEEMEEKGIKPDVVTYTTLIDGLCKAGDVDEALELFKEMRSKGVKPNVVTYTTLIDGLCKAGKVDEALELFDEMKERGIKPDVVTYTTLIDGLCKAGDVDEALELFKEMRSKGVKPNVVTYNTLIDGLCKSGKIEEALKLFKEMEEKGITPSVVTYNTLIDGLCKAGRLDEAEELLEEMEEKGIKPDVVTYNTLIDGLCKAGRLDEAEELLEEMEEKGIKPDELTYNTLISGLGKAGRARDPPVLSSGSGGSGGGGHHHHHHGR

SEQ ID NO: 308 - protein, 659 aa, Artificial Sequence
  Synthesized Sequence
MAGVFTLEDFVGDWRQTAGYNLDQVLEQGGVSSLFQNLGVSVTPIQRIVLSGENGLKIDIHVIIPYEGLSGDQMGQIEKIFKVVYPVDDHHFKVILHYGTLVIDGVTPNMIDYFGRPYEGIAVFDGKKITVTGTLWNGNKIIDERLINPDGSLLFRVTINGVTGWRLCERILAGGGGSLVPRGSGGGGSSRLHMGNSVVTYTTLIDGLCKAGDVDEALELFKEMRSKGVKPNVVTYNTLIDGLCKAGRLDEAEELLEEMEEKGIKPDVVTYNTLIDGLCKAGRLDEAEELLEEMEEKGIKPDVVTYNTLIDGLCKSGKIEEALKLFKEMEEKGITPSVVTYNTLIDGLCKSGKIEEALKLFKEMEEKGITPSVVTYNTLIDGLCKAGRLDEAEELLEEMEEKGIKPDVVTYTTLIDGLCKAGDVDEALELFKEMRSKGVKPNVVTYTTLIDGLCKAGKVDEALELFDEMKERGIKPDVVTYTTLIDGLCKAGDVDEALELFKEMRSKGVKPNVVTYNTLIDGLCKSGKIEEALKLFKEMEEKGITPSVVTYNTLIDGLCKAGRLDEAEELLEEMEEKGIKPDVVTYNTLIDGLCKAGRLDEAEELLEEMEEKGIKPDELTYNTLISGLGKAGRARDPPVLSSGSGGSGGGGHHHHHHGR

SEQ ID NO: 309 - protein, 764 aa, Artificial Sequence
  Synthesized Sequence
MAGVFTLEDFVGDWRQTAGYNLDQVLEQGGVSSLFQNLGVSVTPIQRIVLSGENGLKIDIHVIIPYEGLSGDQMGQIEKIFKVVYPVDDHHFKVILHYGTLVIDGVTPNMIDYFGRPYEGIAVFDGKKITVTGTLWNGNKIIDERLINPDGSLLFRVTINGVTGWRLCERILAGGGGSLVPRGSGGGGSSRLHMGNSVVTYNTLIDGLCKAGRLDEAEELLEEMEEKGIKPDVVTYNTLIDGLCKSGKIEEALKLFKEMEEKGITPSVVTYTTLIDGLCKAGDVDEALELFKEMRSKGVKPNVVTYTTLIDGLCKAGKVDEALELFDEMKERGIKPDVVTYTTLIDGLCKAGKVDEALELFDEMKERGIKPDVVTYTTLIDGLCKAGDVDEALELFKEMRSKGVKPNVVTYTTLIDGLCKAGDVDEALELFKEMRSKGVKPNVVTYNTLIDGLCKAGRLDEAEELLEEMEEKGIKPDVVTYNTLIDGLCKSGKIEEALKLFKEMEEKGITPSVVTYTTLIDGLCKAGKVDEALELFDEMKERGIKPDVVTYTTLIDGLCKAGKVDEALELFDEMKERGIKPDVVTYNTLIDGLCKSGKIEEALKLFKEMEEKGITPSVVTYNTLIDGLCKAGRLDEAEELLEEMEEKGIKPDVVTYNTLIDGLCKSGKIEEALKLFKEMEEKGITPSVVTYNTLIDGLCKAGRLDEAEELLEEMEEKGIKPDELTYNTLISGLGKAGRARDPPVLSSGSGGSGGGGHHHHHHGR

SEQ ID NO: 310 - protein, 659 aa, Artificial Sequence
  Synthesized Sequence
MAGVFTLEDFVGDWRQTAGYNLDQVLEQGGVSSLFQNLGVSVTPIQRIVLSGENGLKIDIHVIIPYEGLSGDQMGQIEKIFKVVYPVDDHHFKVILHYGTLVIDGVTPNMIDYFGRPYEGIAVFDGKKITVTGTLWNGNKIIDERLINPDGSLLFRVTINGVTGWRLCERILAGGGGSLVPRGSGGGGSSRLHMGNSVVTYTTLIDGLCKAGKVDEALELFDEMKERGIKPDVVTYTTLIDGLCKAGKVDEALELFDEMKERGIKPDVVTYTTLIDGLCKAGDVDEALELFKEMRSKGVKPNVVTYTTLIDGLCKAGDVDEALELFKEMRSKGVKPNVVTYNTLIDGLCKAGRLDEAEELLEEMEEKGIKPDVVTYNTLIDGLCKSGKIEEALKLFKEMEEKGITPSVVTYTTLIDGLCKAGKVDEALELFDEMKERGIKPDVVTYTTLIDGLCKAGKVDEALELFDEMKERGIKPDVVTYNTLIDGLCKSGKIEEALKLFKEMEEKGITPSVVTYNTLIDGLCKAGRLDEAEELLEEMEEKGIKPDVVTYNTLIDGLCKSGKIEEALKLFKEMEEKGITPSVVTYNTLIDGLCKAGRLDEAEELLEEMEEKGIKPDELTYNTLISGLGKAGRARDPPVLSSGSGGSGGGGHHHHHHGR

SEQ ID NO: 311 - protein, 764 aa, Artificial Sequence
  Synthesized Sequence
MAGVFTLEDFVGDWRQTAGYNLDQVLEQGGVSSLFQNLGVSVTPIQRIVLSGENGLKIDIHVIIPYEGLSGDQMGQIEKIFKVVYPVDDHHFKVILHYGTLVIDGVTPNMIDYFGRPYEGIAVFDGKKITVTGTLWNGNKIIDERLINPDGSLLFRVTINGVTGWRLCERILAGGGGSLVPRGSGGGGSSRLHMGNSVVTYNTLIDGLCKSGKIEEALKLFKEMEEKGITPSVVTYTTLIDGLCKAGDVDEALELFKEMRSKGVKPNVVTYNTLIDGLCKAGRLDEAEELLEEMEEKGIKPDVVTYNTLIDGLCKSGKIEEALKLFKEMEEKGITPSVVTYTTLIDGLCKAGDVDEALELFKEMRSKGVKPNVVTYTTLIDGLCKAGDVDEALELFKEMRSKGVKPNVVTYTTLIDGLCKAGDVDEALELFKEMRSKGVKPNVVTYTTLIDGLCKAGKVDEALELFDEMKERGIKPDVVTYTTLIDGLCKAGDVDEALELFKEMRSKGVKPNVVTYNTLIDGLCKSGKIEEALKLFKEMEEKGITPSVVTYTTLIDGLCKAGDVDEALELFKEMRSKGVKPNVVTYNTLIDGLCKSGKIEEALKLFKEMEEKGITPSVVTYNTLIDGLCKSGKIEEALKLFKEMEEKGITPSVVTYTTLIDGLCKAGDVDEALELFKEMRSKGVKPNVVTYNTLIDGLCKAGRLDEAEELLEEMEEKGIKPDELTYNTLISGLGKAGRARDPPVLSSGSGGSGGGGHHHHHHGR

SEQ ID NO: 312 - protein, 659 aa, Artificial Sequence
  Synthesized Sequence
MAGVFTLEDFVGDWRQTAGYNLDQVLEQGGVSSLFQNLGVSVTPIQRIVLSGENGLKIDIHVIIPYEGLSGDQMGQIEKIFKVVYPVDDHHFKVILHYGTLVIDGVTPNMIDYFGRPYEGIAVFDGKKITVTGTLWNGNKIIDERLINPDGSLLFRVTINGVTGWRLCERILAGGGGSLVPRGSGGGGSSRLHMGNSVVTYNTLIDGLCKSGKIEEALKLFKEMEEKGITPSVVTYTTLIDGLCKAGDVDEALELFKEMRSKGVKPNVVTYTTLIDGLCKAGDVDEALELFKEMRSKGVKPNVVTYTTLIDGLCKAGDVDEALELFKEMRSKGVKPNVVTYTTLIDGLCKAGKVDEALELFDEMKERGIKPDVVTYTTLIDGLCKAGDVDEALELFKEMRSKGVKPNVVTYNTLIDGLCKSGKIEEALKLFKEMEEKGITPSVVTYTTLIDGLCKAGDVDEALELFKEMRSKGVKPNVVTYNTLIDGLCKSGKIEEALKLFKEMEEKGITPSVVTYNTLIDGLCKSGKIEEALKLFKEMEEKGITPSVVTYTTLIDGLCKAGDVDEALELFKEMRSKGVKPNVVTYNTLIDGLCKAGRLDEAEELLEEMEEKGIKPDELTYNTLISGLGKAGRARDPPVLSSGSGGSGGGGHHHHHHGR

SEQ ID NO: 313 - protein, 764 aa, Artificial Sequence
  Synthesized Sequence
MAGVFTLEDFVGDWRQTAGYNLDQVLEQGGVSSLFQNLGVSVTPIQRIVLSGENGLKIDIHVIIPYEGLSGDQMGQIEKIFKVVYPVDDHHFKVILHYGTLVIDGVTPNMIDYFGRPYEGIAVFDGKKITVTGTLWNGNKIIDERLINPDGSLLFRVTINGVTGWRLCERILAGGGGSLVPRGSGGGGSSRLHMGNSVVTYTTLIDGLCKAGDVDEALELFKEMRSKGVKPNVVTYTTLIDGLCKAGKVDEALELFDEMKERGIKPDVVTYTTLIDGLCKAGKVDEALELFDEMKERGIKPDVVTYTTLIDGLCKAGDVDEALELFKEMRSKGVKPNVVTYTTLIDGLCKAGDVDEALELFKEMRSKGVKPNVVTYTTLIDGLCKAGKVDEALELFDEMKERGIKPDVVTYNTLIDGLCKSGKIEEALKLFKEMEEKGITPSVVTYNTLIDGLCKSGKIEEALKLFKEMEEKGITPSVVTYNTLIDGLCKAGRLDEAEELLEEMEEKGIKPDVVTYTTLIDGLCKAGKVDEALELFDEMKERGIKPDVVTYTTLIDGLCKAGDVDEALELFKEMRSKGVKPNVVTYTTLIDGLCKAGKVDEALELFDEMKERGIKPDVVTYTTLIDGLCKAGDVDEALELFKEMRSKGVKPNVVTYTTLIDGLCKAGKVDEALELFDEMKERGIKPDVVTYNTLIDGLCKAGRLDEAEELLEEMEEKGIKPDELTYNTLISGLGKAGRARDPPVLSSGSGGSGGGGHHHHHHGR

SEQ ID NO: 314 - protein, 659 aa, Artificial Sequence
  Synthesized Sequence
MAGVFTLEDFVGDWRQTAGYNLDQVLEQGGVSSLFQNLGVSVTPIQRIVLSGENGLKIDIHVIIPYEGLSGDQMGQIEKIFKVVYPVDDHHFKVILHYGTLVIDGVTPNMIDYFGRPYEGIAVFDGKKITVTGTLWNGNKIIDERLINPDGSLLFRVTINGVTGWRLCERILAGGGGSLVPRGSGGGGSSRLHMGNSVVTYTTLIDGLCKAGDVDEALELFKEMRSKGVKPNVVTYTTLIDGLCKAGDVDEALELFKEMRSKGVKPNVVTYTTLIDGLCKAGKVDEALELFDEMKERGIKPDVVTYNTLIDGLCKSGKIEEALKLFKEMEEKGITPSVVTYNTLIDGLCKSGKIEEALKLFKEMEEKGITPSVVTYNTLIDGLCKAGRLDEAEELLEEMEEKGIKPDVVTYTTLIDGLCKAGKVDEALELFDEMKERGIKPDVVTYTTLIDGLCKAGDVDEALELFKEMRSKGVKPNVVTYTTLIDGLCKAGKVDEALELFDEMKERGIKPDVVTYTTLIDGLCKAGDVDEALELFKEMRSKGVKPNVVTYTTLIDGLCKAGKVDEALELFDEMKERGIKPDVVTYNTLIDGLCKAGRLDEAEELLEEMEEKGIKPDELTYNTLISGLGKAGRARDPPVLSSGSGGSGGGGHHHHHHGR

SEQ ID NO: 315 - protein, 764 aa, Artificial Sequence
  Synthesized Sequence
MAGVFTLEDFVGDWRQTAGYNLDQVLEQGGVSSLFQNLGVSVTPIQRIVLSGENGLKIDIHVIIPYEGLSGDQMGQIEKIFKVVYPVDDHHFKVILHYGTLVIDGVTPNMIDYFGRPYEGIAVFDGKKITVTGTLWNGNKIIDERLINPDGSLLFRVTINGVTGWRLCERILAGGGGSLVPRGSGGGGSSRLHMGNSVVTYTTLIDGLCKAGDVDEALELFKEMRSKGVKPNVVTYTTLIDGLCKAGKVDEALELFDEMKERGIKPDVVTYTTLIDGLCKAGDVDEALELFKEMRSKGVKPNVVTYTTLIDGLCKAGKVDEALELFDEMKERGIKPDVVTYNTLIDGLCKAGRLDEAEELLEEMEEKGIKPDVVTYNTLIDGLCKAGRLDEAEELLEEMEEKGIKPDVVTYTTLIDGLCKAGKVDEALELFDEMKERGIKPDVVTYTTLIDGLCKAGKVDEALELFDEMKERGIKPDVVTYNTLIDGLCKSGKIEEALKLFKEMEEKGITPSVVTYTTLIDGLCKAGDVDEALELFKEMRSKGVKPNVVTYNTLIDGLCKAGRLDEAEELLEEMEEKGIKPDVVTYTTLIDGLCKAGKVDEALELFDEMKERGIKPDVVTYTTLIDGLCKAGDVDEALELFKEMRSKGVKPNVVTYTTLIDGLCKAGDVDEALELFKEMRSKGVKPNVVTYNTLIDGLCKAGRLDEAEELLEEMEEKGIKPDELTYNTLISGLGKAGRARDPPVLSSGSGGSGGGGHHHHHHGR

SEQ ID NO: 316 - protein, 659 aa, Artificial Sequence
  Synthesized Sequence
MAGVFTLEDFVGDWRQTAGYNLDQVLEQGGVSSLFQNLGVSVTPIQRIVLSGENGLKIDIHVIIPYEGLSGDQMGQIEKIFKVVYPVDDHHFKVILHYGTLVIDGVTPNMIDYFGRPYEGIAVFDGKKITVTGTLWNGNKIIDERLINPDGSLLFRVTINGVTGWRLCERILAGGGGSLVPRGSGGGGSSRLHMGNSVVTYTTLIDGLCKAGKVDEALELFDEMKERGIKPDVVTYNTLIDGLCKAGRLDEAEELLEEMEEKGIKPDVVTYNTLIDGLCKAGRLDEAEELLEEMEEKGIKPDVVTYTTLIDGLCKAGKVDEALELFDEMKERGIKPDVVTYTTLIDGLCKAGKVDEALELFDEMKERGIKPDVVTYNTLIDGLCKSGKIEEALKLFKEMEEKGITPSVVTYTTLIDGLCKAGDVDEALELFKEMRSKGVKPNVVTYNTLIDGLCKAGRLDEAEELLEEMEEKGIKPDVVTYTTLIDGLCKAGKVDEALELFDEMKERGIKPDVVTYTTLIDGLCKAGDVDEALELFKEMRSKGVKPNVVTYTTLIDGLCKAGDVDEALELFKEMRSKGVKPNVVTYNTLIDGLCKAGRLDEAEELLEEMEEKGIKPDELTYNTLISGLGKAGRARDPPVLSSGSGGSGGGGHHHHHHGR

SEQ ID NO: 317 - protein, 764 aa, Artificial Sequence
  Synthesized Sequence
MAGVFTLEDFVGDWRQTAGYNLDQVLEQGGVSSLFQNLGVSVTPIQRIVLSGENGLKIDIHVIIPYEGLSGDQMGQIEKIFKVVYPVDDHHFKVILHYGTLVIDGVTPNMIDYFGRPYEGIAVFDGKKITVTGTLWNGNKIIDERLINPDGSLLFRVTINGVTGWRLCERILAGGGGSLVPRGSGGGGSSRLHMGNSVVTYTTLIDGLCKAGKVDEALELFDEMKERGIKPDVVTYNTLIDGLCKAGRLDEAEELLEEMEEKGIKPDVVTYNTLIDGLCKAGRLDEAEELLEEMEEKGIKPDVVTYTTLIDGLCKAGDVDEALELFKEMRSKGVKPNVVTYNTLIDGLCKAGRLDEAEELLEEMEEKGIKPDVVTYTTLIDGLCKAGKVDEALELFDEMKERGIKPDVVTYNTLIDGLCKAGRLDEAEELLEEMEEKGIKPDVVTYTTLIDGLCKAGKVDEALELFDEMKERGIKPDVVTYNTLIDGLCKAGRLDEAEELLEEMEEKGIKPDVVTYTTLIDGLCKAGKVDEALELFDEMKERGIKPDVVTYNTLIDGLCKAGRLDEAEELLEEMEEKGIKPDVVTYTTLIDGLCKAGKVDEALELFDEMKERGIKPDVVTYTTLIDGLCKAGDVDEALELFKEMRSKGVKPNVVTYNTLIDGLCKAGRLDEAEELLEEMEEKGIKPDVVTYNTLIDGLCKAGRLDEAEELLEEMEEKGIKPDELTYNTLISGLGKAGRARDPPVLSSGSGGSGGGGHHHHHHGR

SEQ ID NO: 318 - protein, 659 aa, Artificial Sequence
  Synthesized Sequence
MAGVFTLEDFVGDWRQTAGYNLDQVLEQGGVSSLFQNLGVSVTPIQRIVLSGENGLKIDIHVIIPYEGLSGDQMGQIEKIFKVVYPVDDHHFKVILHYGTLVIDGVTPNMIDYFGRPYEGIAVFDGKKITVTGTLWNGNKIIDERLINPDGSLLFRVTINGVTGWRLCERILAGGGGSLVPRGSGGGGSSRLHMGNSVVTYTTLIDGLCKAGDVDEALELFKEMRSKGVKPNVVTYNTLIDGLCKAGRLDEAEELLEEMEEKGIKPDVVTYTTLIDGLCKAGKVDEALELFDEMKERGIKPDVVTYNTLIDGLCKAGRLDEAEELLEEMEEKGIKPDVVTYTTLIDGLCKAGKVDEALELFDEMKERGIKPDVVTYNTLIDGLCKAGRLDEAEELLEEMEEKGIKPDVVTYTTLIDGLCKAGKVDEALELFDEMKERGIKPDVVTYNTLIDGLCKAGRLDEAEELLEEMEEKGIKPDVVTYTTLIDGLCKAGKVDEALELFDEMKERGIKPDVVTYTTLIDGLCKAGDVDEALELFKEMRSKGVKPNVVTYNTLIDGLCKAGRLDEAEELLEEMEEKGIKPDVVTYNTLIDGLCKAGRLDEAEELLEEMEEKGIKPDELTYNTLISGLGKAGRARDPPVLSSGSGGSGGGGHHHHHHGR

SEQ ID NO: 319 - protein, 764 aa, Artificial Sequence
  Synthesized Sequence
MAGVFTLEDFVGDWRQTAGYNLDQVLEQGGVSSLFQNLGVSVTPIQRIVLSGENGLKIDIHVIIPYEGLSGDQMGQIEKIFKVVYPVDDHHFKVILHYGTLVIDGVTPNMIDYFGRPYEGIAVFDGKKITVTGTLWNGNKIIDERLINPDGSLLFRVTINGVTGWRLCERILAGGGGSLVPRGSGGGGSSRLHMGNSVVTYNTLIDGLCKSGKIEEALKLFKEMEEKGITPSVVTYNTLIDGLCKSGKIEEALKLFKEMEEKGITPSVVTYTTLIDGLCKAGDVDEALELFKEMRSKGVKPNVVTYNTLIDGLCKAGRLDEAEELLEEMEEKGIKPDVVTYTTLIDGLCKAGKVDEALELFDEMKERGIKPDVVTYNTLIDGLCKSGKIEEALKLFKEMEEKGITPSVVTYTTLIDGLCKAGDVDEALELFKEMRSKGVKPNVVTYNTLIDGLCKAGRLDEAEELLEEMEEKGIKPDVVTYNTLIDGLCKSGKIEEALKLFKEMEEKGITPSVVTYNTLIDGLCKAGRLDEAEELLEEMEEKGIKPDVVTYNTLIDGLCKAGRLDEAEELLEEMEEKGIKPDVVTYTTLIDGLCKAGKVDEALELFDEMKERGIKPDVVTYTTLIDGLCKAGKVDEALELFDEMKERGIKPDVVTYTTLIDGLCKAGDVDEALELFKEMRSKGVKPNVVTYTTLIDGLCKAGDVDEALELFKEMRSKGVKPNELTYNTLISGLGKAGRARDPPVLSSGSGGSGGGGHHHHHHGR

SEQ ID NO: 320 - protein, 659 aa, Artificial Sequence
  Synthesized Sequence
MAGVFTLEDFVGDWRQTAGYNLDQVLEQGGVSSLFQNLGVSVTPIQRIVLSGENGLKIDIHVIIPYEGLSGDQMGQIEKIFKVVYPVDDHHFKVILHYGTLVIDGVTPNMIDYFGRPYEGIAVFDGKKITVTGTLWNGNKIIDERLINPDGSLLFRVTINGVTGWRLCERILAGGGGSLVPRGSGGGGSSRLHMGNSVVTYNTLIDGLCKAGRLDEAEELLEEMEEKGIKPDVVTYTTLIDGLCKAGKVDEALELFDEMKERGIKPDVVTYNTLIDGLCKSGKIEEALKLFKEMEEKGITPSVVTYTTLIDGLCKAGDVDEALELFKEMRSKGVKPNVVTYNTLIDGLCKAGRLDEAEELLEEMEEKGIKPDVVTYNTLIDGLCKSGKIEEALKLFKEMEEKGITPSVVTYNTLIDGLCKAGRLDEAEELLEEMEEKGIKPDVVTYNTLIDGLCKAGRLDEAEELLEEMEEKGIKPDVVTYTTLIDGLCKAGKVDEALELFDEMKERGIKPDVVTYTTLIDGLCKAGKVDEALELFDEMKERGIKPDVVTYTTLIDGLCKAGDVDEALELFKEMRSKGVKPNVVTYTTLIDGLCKAGDVDEALELFKEMRSKGVKPNELTYNTLISGLGKAGRARDPPVLSSGSGGSGGGGHHHHHHGR

SEQ ID NO: 321 - protein, 764 aa, Artificial Sequence
  Synthesized Sequence
MAGVFTLEDFVGDWRQTAGYNLDQVLEQGGVSSLFQNLGVSVTPIQRIVLSGENGLKIDIHVIIPYEGLSGDQMGQIEKIFKVVYPVDDHHFKVILHYGTLVIDGVTPNMIDYFGRPYEGIAVFDGKKITVTGTLWNGNKIIDERLINPDGSLLFRVTINGVTGWRLCERILAGGGGSLVPRGSGGGGSSRLHMGNSVVTYNTLIDGLCKSGKIEEALKLFKEMEEKGITPSVVTYTTLIDGLCKAGDVDEALELFKEMRSKGVKPNVVTYNTLIDGLCKAGRLDEAEELLEEMEEKGIKPDVVTYTTLIDGLCKAGDVDEALELFKEMRSKGVKPNVVTYNTLIDGLCKSGKIEEALKLFKEMEEKGITPSVVTYNTLIDGLCKAGRLDEAEELLEEMEEKGIKPDVVTYTTLIDGLCKAGDVDEALELFKEMRSKGVKPNVVTYNTLIDGLCKAGRLDEAEELLEEMEEKGIKPDVVTYNTLIDGLCKAGRLDEAEELLEEMEEKGIKPDVVTYNTLIDGLCKAGRLDEAEELLEEMEEKGIKPDVVTYTTLIDGLCKAGDVDEALELFKEMRSKGVKPNVVTYNTLIDGLCKAGRLDEAEELLEEMEEKGIKPDVVTYTTLIDGLCKAGKVDEALELFDEMKERGIKPDVVTYNTLIDGLCKAGRLDEAEELLEEMEEKGIKPDVVTYTTLIDGLCKAGKVDEALELFDEMKERGIKPDELTYNTLISGLGKAGRARDPPVLSSGSGGSGGGGHHHHHHGR

SEQ ID NO: 322 - protein, 659 aa, Artificial Sequence
  Synthesized Sequence
MAGVFTLEDFVGDWRQTAGYNLDQVLEQGGVSSLFQNLGVSVTPIQRIVLSGENGLKIDIHVIIPYEGLSGDQMGQIEKIFKVVYPVDDHHFKVILHYGTLVIDGVTPNMIDYFGRPYEGIAVFDGKKITVTGTLWNGNKIIDERLINPDGSLLFRVTINGVTGWRLCERILAGGGGSLVPRGSGGGGSSRLHMGNSVVTYTTLIDGLCKAGDVDEALELFKEMRSKGVKPNVVTYNTLIDGLCKSGKIEEALKLFKEMEEKGITPSVVTYNTLIDGLCKAGRLDEAEELLEEMEEKGIKPDVVTYTTLIDGLCKAGDVDEALELFKEMRSKGVKPNVVTYNTLIDGLCKAGRLDEAEELLEEMEEKGIKPDVVTYNTLIDGLCKAGRLDEAEELLEEMEEKGIKPDVVTYNTLIDGLCKAGRLDEAEELLEEMEEKGIKPDVVTYTTLIDGLCKAGDVDEALELFKEMRSKGVKPNVVTYNTLIDGLCKAGRLDEAEELLEEMEEKGIKPDVVTYTTLIDGLCKAGKVDEALELFDEMKERGIKPDVVTYNTLIDGLCKAGRLDEAEELLEEMEEKGIKPDVVTYTTLIDGLCKAGKVDEALELFDEMKERGIKPDELTYNTLISGLGKAGRARDPPVLSSGSGGSGGGGHHHHHHGR

SEQ ID NO: 323 - protein, 764 aa, Artificial Sequence
  Synthesized Sequence
MAGVFTLEDFVGDWRQTAGYNLDQVLEQGGVSSLFQNLGVSVTPIQRIVLSGENGLKIDIHVIIPYEGLSGDQMGQIEKIFKVVYPVDDHHFKVILHYGTLVIDGVTPNMIDYFGRPYEGIAVFDGKKITVTGTLWNGNKIIDERLINPDGSLLFRVTINGVTGWRLCERILAGGGGSLVPRGSGGGGSSRLHMGNSVVTYNTLIDGLCKSGKIEEALKLFKEMEEKGITPSVVTYNTLIDGLCKSGKIEEALKLFKEMEEKGITPSVVTYNTLIDGLCKAGRLDEAEELLEEMEEKGIKPDVVTYTTLIDGLCKAGDVDEALELFKEMRSKGVKPNVVTYNTLIDGLCKAGRLDEAEELLEEMEEKGIKPDVVTYTTLIDGLCKAGDVDEALELFKEMRSKGVKPNVVTYTTLIDGLCKAGKVDEALELFDEMKERGIKPDVVTYNTLIDGLCKSGKIEEALKLFKEMEEKGITPSVVTYTTLIDGLCKAGDVDEALELFKEMRSKGVKPNVVTYNTLIDGLCKSGKIEEALKLFKEMEEKGITPSVVTYNTLIDGLCKAGRLDEAEELLEEMEEKGIKPDVVTYNTLIDGLCKSGKIEEALKLFKEMEEKGITPSVVTYTTLIDGLCKAGKVDEALELFDEMKERGIKPDVVTYTTLIDGLCKAGDVDEALELFKEMRSKGVKPNVVTYTTLIDGLCKAGDVDEALELFKEMRSKGVKPNELTYNTLISGLGKAGRARDPPVLSSGSGGSGGGGHHHHHHGR

SEQ ID NO: 324 - protein, 659 aa, Artificial Sequence
  Synthesized Sequence
MAGVFTLEDFVGDWRQTAGYNLDQVLEQGGVSSLFQNLGVSVTPIQRIVLSGENGLKIDIHVIIPYEGLSGDQMGQIEKIFKVVYPVDDHHFKVILHYGTLVIDGVTPNMIDYFGRPYEGIAVFDGKKITVTGTLWNGNKIIDERLINPDGSLLFRVTINGVTGWRLCERILAGGGGSLVPRGSGGGGSSRLHMGNSVVTYTTLIDGLCKAGDVDEALELFKEMRSKGVKPNVVTYNTLIDGLCKAGRLDEAEELLEEMEEKGIKPDVVTYTTLIDGLCKAGDVDEALELFKEMRSKGVKPNVVTYTTLIDGLCKAGKVDEALELFDEMKERGIKPDVVTYNTLIDGLCKSGKIEEALKLFKEMEEKGITPSVVTYTTLIDGLCKAGDVDEALELFKEMRSKGVKPNVVTYNTLIDGLCKSGKIEEALKLFKEMEEKGITPSVVTYNTLIDGLCKAGRLDEAEELLEEMEEKGIKPDVVTYNTLIDGLCKSGKIEEALKLFKEMEEKGITPSVVTYTTLIDGLCKAGKVDEALELFDEMKERGIKPDVVTYTTLIDGLCKAGDVDEALELFKEMRSKGVKPNVVTYTTLIDGLCKAGDVDEALELFKEMRSKGVKPNELTYNTLISGLGKAGRARDPPVLSSGSGGSGGGGHHHHHHGR

SEQ ID NO: 325 - DNA, 18 bp, Artificial Sequence
  Synthesized Sequence
ugccccacagcuuuaagg

SEQ ID NO: 326 - DNA, 18 bp, Artificial Sequence
  Synthesized Sequence
gcuaaccucugcgcuucu

SEQ ID NO: 327 - DNA, 18 bp, Artificial Sequence
  Synthesized Sequence
gcuucuucccuucccucc

SEQ ID NO: 328 - DNA, 18 bp, Artificial Sequence
  Synthesized Sequence
cccuccucccuggcucag

SEQ ID NO: 329 - DNA, 18 bp, Artificial Sequence
  Synthesized Sequence
gcucaggauccaggcgau

SEQ ID NO: 330 - DNA, 18 bp, Artificial Sequence
  Synthesized Sequence
ggcgauauccggaagaau

SEQ ID NO: 331 - protein, 657 aa, Artificial Sequence
  Synthesized Sequence
MGNSVVTYNTLIDGLCKAGKLDEALKLFEEMVEKGIKPDVVTYTTLIDGLCKAGKLDEALKLFEEMVEKGIKPDVVTYNTLIDGLCKAGKLDEALKLFEEMVEKGIKPSVVTYNTLIDGLCKAGKLDEALKLFEEMVEKGIKPSVVTYNTLIDGLCKAGKLDEALKLFEEMVEKGIKPSVVTYNTLIDGLCKAGKLDEALKLFEEMVEKGIKPSVVTYTTLIDGLCKAGKLDEALKLFEEMVEKGIKPNVVTYNTLIDGLCKAGKLDEALKLFEEMVEKGIKPSVVTYTTLIDGLCKAGKLDEALKLFEEMVEKGIKPNVVTYTTLIDGLCKAGKLDEALKLFEEMVEKGIKPDVVTYNTLIDGLCKAGKLDEALKLFEEMVEKGIKPSVVTYNTLIDGLCKAGKLDEALKLFEEMVEKGIKPDVVTYNTLIDGLCKAGKLDEALKLFEEMVEKGIKPDVVTYNTLIDGLCKAGKLDEALKLFEEMVEKGIKPDVVTYTTLIDGLCKAGKLDEALKLFEEMVEKGIKPNVVTYTTLIDGLCKAGKLDEALKLFEEMVEKGIKPNVVTYTTLIDGLCKAGKLDEALKLFEEMVEKGIKPDVVTYTTLIDGLCKAGKLDEALKLFEEMVEKGIKPDELTYNTLISGLGKAGRARDPPVL

SEQ ID NO: 332 - protein, 657 aa, Artificial Sequence
  Synthesized Sequence
MGNSVVTYTTLIDGLCKAGKLDEALKLFEEMVEKGIKPDVVTYNTLIDGLCKAGKLDEALKLFEEMVEKGIKPSVVTYNTLIDGLCKAGKLDEALKLFEEMVEKGIKPDVVTYTTLIDGLCKAGKLDEALKLFEEMVEKGIKPNVVTYTTLIDGLCKAGKLDEALKLFEEMVEKGIKPNVVTYNTLIDGLCKAGKLDEALKLFEEMVEKGIKPSVVTYNTLIDGLCKAGKLDEALKLFEEMVEKGIKPSVVTYNTLIDGLCKAGKLDEALKLFEEMVEKGIKPDVVTYNTLIDGLCKAGKLDEALKLFEEMVEKGIKPSVVTYNTLIDGLCKAGKLDEALKLFEEMVEKGIKPDVVTYTTLIDGLCKAGKLDEALKLFEEMVEKGIKPDVVTYNTLIDGLCKAGKLDEALKLFEEMVEKGIKPSVVTYTTLIDGLCKAGKLDEALKLFEEMVEKGIKPDVVTYNTLIDGLCKAGKLDEALKLFEEMVEKGIKPSVVTYNTLIDGLCKAGKLDEALKLFEEMVEKGIKPDVVTYNTLIDGLCKAGKLDEALKLFEEMVEKGIKPDVVTYNTLIDGLCKAGKLDEALKLFEEMVEKGIKPSVVTYNTLIDGLCKAGKLDEALKLFEEMVEKGIKPDELTYNTLISGLGKAGRARDPPVL

SEQ ID NO: 333 - protein, 657 aa, Artificial Sequence
  Synthesized Sequence
MGNSVVTYTTLIDGLCKAGKLDEALKLFEEMVEKGIKPDVVTYNTLIDGLCKAGKLDEALKLFEEMVEKGIKPSVVTYNTLIDGLCKAGKLDEALKLFEEMVEKGIKPDVVTYNTLIDGLCKAGKLDEALKLFEEMVEKGIKPDVVTYNTLIDGLCKAGKLDEALKLFEEMVEKGIKPSVVTYNTLIDGLCKAGKLDEALKLFEEMVEKGIKPDVVTYNTLIDGLCKAGKLDEALKLFEEMVEKGIKPDVVTYNTLIDGLCKAGKLDEALKLFEEMVEKGIKPSVVTYNTLIDGLCKAGKLDEALKLFEEMVEKGIKPSVVTYNTLIDGLCKAGKLDEALKLFEEMVEKGIKPSVVTYNTLIDGLCKAGKLDEALKLFEEMVEKGIKPDVVTYNTLIDGLCKAGKLDEALKLFEEMVEKGIKPDVVTYNTLIDGLCKAGKLDEALKLFEEMVEKGIKPSVVTYNTLIDGLCKAGKLDEALKLFEEMVEKGIKPSVVTYNTLIDGLCKAGKLDEALKLFEEMVEKGIKPSVVTYNTLIDGLCKAGKLDEALKLFEEMVEKGIKPDVVTYNTLIDGLCKAGKLDEALKLFEEMVEKGIKPSVVTYNTLIDGLCKAGKLDEALKLFEEMVEKGIKPSELTYNTLISGLGKAGRARDPPVL

SEQ ID NO: 334 - protein, 657 aa, Artificial Sequence
  Synthesized Sequence
MGNSVVTYNTLIDGLCKAGKLDEALKLFEEMVEKGIKPSVVTYNTLIDGLCKAGKLDEALKLFEEMVEKGIKPSVVTYNTLIDGLCKAGKLDEALKLFEEMVEKGIKPSVVTYNTLIDGLCKAGKLDEALKLFEEMVEKGIKPDVVTYNTLIDGLCKAGKLDEALKLFEEMVEKGIKPSVVTYNTLIDGLCKAGKLDEALKLFEEMVEKGIKPSVVTYNTLIDGLCKAGKLDEALKLFEEMVEKGIKPDVVTYNTLIDGLCKAGKLDEALKLFEEMVEKGIKPSVVTYNTLIDGLCKAGKLDEALKLFEEMVEKGIKPSVVTYNTLIDGLCKAGKLDEALKLFEEMVEKGIKPSVVTYNTLIDGLCKAGKLDEALKLFEEMVEKGIKPDVVTYTTLIDGLCKAGKLDEALKLFEEMVEKGIKPDVVTYTTLIDGLCKAGKLDEALKLFEEMVEKGIKPDVVTYNTLIDGLCKAGKLDEALKLFEEMVEKGIKPSVVTYNTLIDGLCKAGKLDEALKLFEEMVEKGIKPDVVTYNTLIDGLCKAGKLDEALKLFEEMVEKGIKPSVVTYTTLIDGLCKAGKLDEALKLFEEMVEKGIKPNVVTYTTLIDGLCKAGKLDEALKLFEEMVEKGIKPDELTYNTLISGLGKAGRARDPPVL

SEQ ID NO: 335 - protein, 657 aa, Artificial Sequence
  Synthesized Sequence
MGNSVVTYTTLIDGLCKAGKLDEALKLFEEMVEKGIKPDVVTYNTLIDGLCKAGKLDEALKLFEEMVEKGIKPSVVTYNTLIDGLCKAGKLDEALKLFEEMVEKGIKPDVVTYNTLIDGLCKAGKLDEALKLFEEMVEKGIKPSVVTYTTLIDGLCKAGKLDEALKLFEEMVEKGIKPNVVTYTTLIDGLCKAGKLDEALKLFEEMVEKGIKPDVVTYTTLIDGLCKAGKLDEALKLFEEMVEKGIKPDVVTYTTLIDGLCKAGKLDEALKLFEEMVEKGIKPNVVTYNTLIDGLCKAGKLDEALKLFEEMVEKGIKPDVVTYNTLIDGLCKAGKLDEALKLFEEMVEKGIKPSVVTYNTLIDGLCKAGKLDEALKLFEEMVEKGIKPSVVTYTTLIDGLCKAGKLDEALKLFEEMVEKGIKPNVVTYTTLIDGLCKAGKLDEALKLFEEMVEKGIKPDVVTYTTLIDGLCKAGKLDEALKLFEEMVEKGIKPDVVTYNTLIDGLCKAGKLDEALKLFEEMVEKGIKPSVVTYTTLIDGLCKAGKLDEALKLFEEMVEKGIKPDVVTYTTLIDGLCKAGKLDEALKLFEEMVEKGIKPNVVTYNTLIDGLCKAGKLDEALKLFEEMVEKGIKPDELTYNTLISGLGKAGRARDPPVL

SEQ ID NO: 336 - protein, 657 aa, Artificial Sequence
  Synthesized Sequence
MGNSVVTYTTLIDGLCKAGKLDEALKLFEEMVEKGIKPDVVTYTTLIDGLCKAGKLDEALKLFEEMVEKGIKPDVVTYNTLIDGLCKAGKLDEALKLFEEMVEKGIKPSVVTYTTLIDGLCKAGKLDEALKLFEEMVEKGIKPDVVTYTTLIDGLCKAGKLDEALKLFEEMVEKGIKPNVVTYNTLIDGLCKAGKLDEALKLFEEMVEKGIKPDVVTYTTLIDGLCKAGKLDEALKLFEEMVEKGIKPNVVTYNTLIDGLCKAGKLDEALKLFEEMVEKGIKPDVVTYNTLIDGLCKAGKLDEALKLFEEMVEKGIKPSVVTYNTLIDGLCKAGKLDEALKLFEEMVEKGIKPSVVTYTTLIDGLCKAGKLDEALKLFEEMVEKGIKPDVVTYTTLIDGLCKAGKLDEALKLFEEMVEKGIKPDVVTYTTLIDGLCKAGKLDEALKLFEEMVEKGIKPNVVTYTTLIDGLCKAGKLDEALKLFEEMVEKGIKPNVVTYTTLIDGLCKAGKLDEALKLFEEMVEKGIKPDVVTYTTLIDGLCKAGKLDEALKLFEEMVEKGIKPNVVTYTTLIDGLCKAGKLDEALKLFEEMVEKGIKPNVVTYNTLIDGLCKAGKLDEALKLFEEMVEKGIKPDELTYNTLISGLGKAGRARDPPVL

SEQ ID NO: 337 - protein, 657 aa, Artificial Sequence
  Synthesized Sequence
MGNSVVTYNTLIDGLCKAGRLDEAEELLEEMEEKGIKPDVVTYTTLIDGLCKAGKVDEALELFDEMKERGIKPDVVTYNTLIDGLCKSGKIEEALKLFKEMEEKGITPSVVTYNTLIDGLCKSGKIEEALKLFKEMEEKGITPSVVTYNTLIDGLCKSGKIEEALKLFKEMEEKGITPSVVTYNTLIDGLCKSGKIEEALKLFKEMEEKGITPSVVTYTTLIDGLCKAGDVDEALELFKEMRSKGVKPNVVTYNTLIDGLCKSGKIEEALKLFKEMEEKGITPSVVTYTTLIDGLCKAGDVDEALELFKEMRSKGVKPNVVTYTTLIDGLCKAGKVDEALELFDEMKERGIKPDVVTYNTLIDGLCKSGKIEEALKLFKEMEEKGITPSVVTYNTLIDGLCKAGRLDEAEELLEEMEEKGIKPDVVTYNTLIDGLCKAGRLDEAEELLEEMEEKGIKPDVVTYNTLIDGLCKAGRLDEAEELLEEMEEKGIKPDVVTYTTLIDGLCKAGDVDEALELFKEMRSKGVKPNVVTYTTLIDGLCKAGDVDEALELFKEMRSKGVKPNVVTYTTLIDGLCKAGKVDEALELFDEMKERGIKPDVVTYTTLIDGLCKAGKVDEALELFDEMKERGIKPDELTYNTLISGLGKAGRARDPPVL

SEQ ID NO: 338 - protein, 657 aa, Artificial Sequence
  Synthesized Sequence
MGNSVVTYTTLIDGLCKAGKVDEALELFDEMKERGIKPDVVTYNTLIDGLCKSGKIEEALKLFKEMEEKGITPSVVTYNTLIDGLCKAGRLDEAEELLEEMEEKGIKPDVVTYTTLIDGLCKAGDVDEALELFKEMRSKGVKPNVVTYTTLIDGLCKAGDVDEALELFKEMRSKGVKPNVVTYNTLIDGLCKSGKIEEALKLFKEMEEKGITPSVVTYNTLIDGLCKSGKIEEALKLFKEMEEKGITPSVVTYNTLIDGLCKAGRLDEAEELLEEMEEKGIKPDVVTYNTLIDGLCKSGKIEEALKLFKEMEEKGITPSVVTYNTLIDGLCKAGRLDEAEELLEEMEEKGIKPDVVTYTTLIDGLCKAGKVDEALELFDEMKERGIKPDVVTYNTLIDGLCKSGKIEEALKLFKEMEEKGITPSVVTYTTLIDGLCKAGKVDEALELFDEMKERGIKPDVVTYNTLIDGLCKSGKIEEALKLFKEMEEKGITPSVVTYNTLIDGLCKAGRLDEAEELLEEMEEKGIKPDVVTYNTLIDGLCKAGRLDEAEELLEEMEEKGIKPDVVTYNTLIDGLCKSGKIEEALKLFKEMEEKGITPSVVTYNTLIDGLCKAGRLDEAEELLEEMEEKGIKPDELTYNTLISGLGKAGRARDPPVL

SEQ ID NO: 339 - protein, 657 aa, Artificial Sequence
  Synthesized Sequence
MGNSVVTYTTLIDGLCKAGKVDEALELFDEMKERGIKPDVVTYNTLIDGLCKSGKIEEALKLFKEMEEKGITPSVVTYNTLIDGLCKAGRLDEAEELLEEMEEKGIKPDVVTYNTLIDGLCKAGRLDEAEELLEEMEEKGIKPDVVTYNTLIDGLCKSGKIEEALKLFKEMEEKGITPSVVTYNTLIDGLCKAGRLDEAEELLEEMEEKGIKPDVVTYNTLIDGLCKAGRLDEAEELLEEMEEKGIKPDVVTYNTLIDGLCKSGKIEEALKLFKEMEEKGITPSVVTYNTLIDGLCKSGKIEEALKLFKEMEEKGITPSVVTYNTLIDGLCKSGKIEEALKLFKEMEEKGITPSVVTYNTLIDGLCKAGRLDEAEELLEEMEEKGIKPDVVTYNTLIDGLCKAGRLDEAEELLEEMEEKGIKPDVVTYNTLIDGLCKSGKIEEALKLFKEMEEKGITPSVVTYNTLIDGLCKSGKIEEALKLFKEMEEKGITPSVVTYNTLIDGLCKSGKIEEALKLFKEMEEKGITPSVVTYNTLIDGLCKAGRLDEAEELLEEMEEKGIKPDVVTYNTLIDGLCKSGKIEEALKLFKEMEEKGITPSVVTYNTLIDGLCKSGKIEEALKLFKEMEEKGITPSELTYNTLISGLGKAGRARDPPVL

SEQ ID NO: 340 - protein, 657 aa, Artificial Sequence
  Synthesized Sequence
MGNSVVTYNTLIDGLCKSGKIEEALKLFKEMEEKGITPSVVTYNTLIDGLCKSGKIEEALKLFKEMEEKGITPSVVTYNTLIDGLCKSGKIEEALKLFKEMEEKGITPSVVTYNTLIDGLCKAGRLDEAEELLEEMEEKGIKPDVVTYNTLIDGLCKSGKIEEALKLFKEMEEKGITPSVVTYNTLIDGLCKSGKIEEALKLFKEMEEKGITPSVVTYNTLIDGLCKAGRLDEAEELLEEMEEKGIKPDVVTYNTLIDGLCKSGKIEEALKLFKEMEEKGITPSVVTYNTLIDGLCKSGKIEEALKLFKEMEEKGITPSVVTYNTLIDGLCKSGKIEEALKLFKEMEEKGITPSVVTYNTLIDGLCKAGRLDEAEELLEEMEEKGIKPDVVTYTTLIDGLCKAGKVDEALELFDEMKERGIKPDVVTYTTLIDGLCKAGKVDEALELFDEMKERGIKPDVVTYNTLIDGLCKSGKIEEALKLFKEMEEKGITPSVVTYNTLIDGLCKAGRLDEAEELLEEMEEKGIKPDVVTYNTLIDGLCKSGKIEEALKLFKEMEEKGITPSVVTYTTLIDGLCKAGDVDEALELFKEMRSKGVKPNVVTYTTLIDGLCKAGKVDEALELFDEMKERGIKPDELTYNTLISGLGKAGRARDPPVL

SEQ ID NO: 341 - protein, 657 aa, Artificial Sequence
  Synthesized Sequence
MGNSVVTYTTLIDGLCKAGKVDEALELFDEMKERGIKPDVVTYNTLIDGLCKSGKIEEALKLFKEMEEKGITPSVVTYNTLIDGLCKAGRLDEAEELLEEMEEKGIKPDVVTYNTLIDGLCKSGKIEEALKLFKEMEEKGITPSVVTYTTLIDGLCKAGDVDEALELFKEMRSKGVKPNVVTYTTLIDGLCKAGKVDEALELFDEMKERGIKPDVVTYTTLIDGLCKAGKVDEALELFDEMKERGIKPDVVTYTTLIDGLCKAGDVDEALELFKEMRSKGVKPNVVTYNTLIDGLCKAGRLDEAEELLEEMEEKGIKPDVVTYNTLIDGLCKSGKIEEALKLFKEMEEKGITPSVVTYNTLIDGLCKSGKIEEALKLFKEMEEKGITPSVVTYTTLIDGLCKAGDVDEALELFKEMRSKGVKPNVVTYTTLIDGLCKAGKVDEALELFDEMKERGIKPDVVTYTTLIDGLCKAGKVDEALELFDEMKERGIKPDVVTYNTLIDGLCKSGKIEEALKLFKEMEEKGITPSVVTYTTLIDGLCKAGKVDEALELFDEMKERGIKPDVVTYTTLIDGLCKAGDVDEALELFKEMRSKGVKPNVVTYNTLIDGLCKAGRLDEAEELLEEMEEKGIKPDELTYNTLISGLGKAGRARDPPVL

SEQ ID NO: 342 - protein, 657 aa, Artificial Sequence
  Synthesized Sequence
MGNSVVTYTTLIDGLCKAGKVDEALELFDEMKERGIKPDVVTYTTLIDGLCKAGKVDEALELFDEMKERGIKPDVVTYNTLIDGLCKSGKIEEALKLFKEMEEKGITPSVVTYTTLIDGLCKAGKVDEALELFDEMKERGIKPDVVTYTTLIDGLCKAGDVDEALELFKEMRSKGVKPNVVTYNTLIDGLCKAGRLDEAEELLEEMEEKGIKPDVVTYTTLIDGLCKAGDVDEALELFKEMRSKGVKPNVVTYNTLIDGLCKAGRLDEAEELLEEMEEKGIKPDVVTYNTLIDGLCKSGKIEEALKLFKEMEEKGITPSVVTYNTLIDGLCKSGKIEEALKLFKEMEEKGITPSVVTYTTLIDGLCKAGKVDEALELFDEMKERGIKPDVVTYTTLIDGLCKAGKVDEALELFDEMKERGIKPDVVTYTTLIDGLCKAGDVDEALELFKEMRSKGVKPNVVTYTTLIDGLCKAGDVDEALELFKEMRSKGVKPNVVTYTTLIDGLCKAGKVDEALELFDEMKERGIKPDVVTYTTLIDGLCKAGDVDEALELFKEMRSKGVKPNVVTYTTLIDGLCKAGDVDEALELFKEMRSKGVKPNVVTYNTLIDGLCKAGRLDEAEELLEEMEEKGIKPDELTYNTLISGLGKAGRARDPPVL

SEQ ID NO: 343 - protein, 738 aa, Artificial Sequence
  Synthesized Sequence
MAGYPYDVPDYAPKKKRKVEDPKKKRKVEDPKKKRKVGGSGGHMGSGGSRLHMGNSVVTYNTLIDGLCKAGKLDEALKLFEEMVEKGIKPDVVTYTTLIDGLCKAGKLDEALKLFEEMVEKGIKPDVVTYNTLIDGLCKAGKLDEALKLFEEMVEKGIKPSVVTYNTLIDGLCKAGKLDEALKLFEEMVEKGIKPSVVTYNTLIDGLCKAGKLDEALKLFEEMVEKGIKPSVVTYNTLIDGLCKAGKLDEALKLFEEMVEKGIKPSVVTYTTLIDGLCKAGKLDEALKLFEEMVEKGIKPNVVTYNTLIDGLCKAGKLDEALKLFEEMVEKGIKPSVVTYTTLIDGLCKAGKLDEALKLFEEMVEKGIKPNVVTYTTLIDGLCKAGKLDEALKLFEEMVEKGIKPDVVTYNTLIDGLCKAGKLDEALKLFEEMVEKGIKPSVVTYNTLIDGLCKAGKLDEALKLFEEMVEKGIKPDVVTYNTLIDGLCKAGKLDEALKLFEEMVEKGIKPDVVTYNTLIDGLCKAGKLDEALKLFEEMVEKGIKPDVVTYTTLIDGLCKAGKLDEALKLFEEMVEKGIKPNVVTYTTLIDGLCKAGKLDEALKLFEEMVEKGIKPNVVTYTTLIDGLCKAGKLDEALKLFEEMVEKGIKPDVVTYTTLIDGLCKAGKLDEALKLFEEMVEKGIKPDELTYNTLISGLGKAGRARDPPVLSSGDYKDHDGDYKDHDIDYKDDDDKMAGR

SEQ ID NO: 344 - protein, 738 aa, Artificial Sequence
  Synthesized Sequence
MAGYPYDVPDYAPKKKRKVEDPKKKRKVEDPKKKRKVGGSGGHMGSGGSRLHMGNSVVTYTTLIDGLCKAGKLDEALKLFEEMVEKGIKPDVVTYNTLIDGLCKAGKLDEALKLFEEMVEKGIKPSVVTYNTLIDGLCKAGKLDEALKLFEEMVEKGIKPDVVTYTTLIDGLCKAGKLDEALKLFEEMVEKGIKPNVVTYTTLIDGLCKAGKLDEALKLFEEMVEKGIKPNVVTYNTLIDGLCKAGKLDEALKLFEEMVEKGIKPSVVTYNTLIDGLCKAGKLDEALKLFEEMVEKGIKPSVVTYNTLIDGLCKAGKLDEALKLFEEMVEKGIKPDVVTYNTLIDGLCKAGKLDEALKLFEEMVEKGIKPSVVTYNTLIDGLCKAGKLDEALKLFEEMVEKGIKPDVVTYTTLIDGLCKAGKLDEALKLFEEMVEKGIKPDVVTYNTLIDGLCKAGKLDEALKLFEEMVEKGIKPSVVTYTTLIDGLCKAGKLDEALKLFEEMVEKGIKPDVVTYNTLIDGLCKAGKLDEALKLFEEMVEKGIKPSVVTYNTLIDGLCKAGKLDEALKLFEEMVEKGIKPDVVTYNTLIDGLCKAGKLDEALKLFEEMVEKGIKPDVVTYNTLIDGLCKAGKLDEALKLFEEMVEKGIKPSVVTYNTLIDGLCKAGKLDEALKLFEEMVEKGIKPDELTYNTLISGLGKAGRARDPPVLSSGDYKDHDGDYKDHDIDYKDDDDKMAGR

SEQ ID NO: 345 - protein, 738 aa, Artificial Sequence
  Synthesized Sequence
MAGYPYDVPDYAPKKKRKVEDPKKKRKVEDPKKKRKVGGSGGHMGSGGSRLHMGNSVVTYTTLIDGLCKAGKLDEALKLFEEMVEKGIKPDVVTYNTLIDGLCKAGKLDEALKLFEEMVEKGIKPSVVTYNTLIDGLCKAGKLDEALKLFEEMVEKGIKPDVVTYNTLIDGLCKAGKLDEALKLFEEMVEKGIKPDVVTYNTLIDGLCKAGKLDEALKLFEEMVEKGIKPSVVTYNTLIDGLCKAGKLDEALKLFEEMVEKGIKPDVVTYNTLIDGLCKAGKLDEALKLFEEMVEKGIKPDVVTYNTLIDGLCKAGKLDEALKLFEEMVEKGIKPSVVTYNTLIDGLCKAGKLDEALKLFEEMVEKGIKPSVVTYNTLIDGLCKAGKLDEALKLFEEMVEKGIKPSVVTYNTLIDGLCKAGKLDEALKLFEEMVEKGIKPDVVTYNTLIDGLCKAGKLDEALKLFEEMVEKGIKPDVVTYNTLIDGLCKAGKLDEALKLFEEMVEKGIKPSVVTYNTLIDGLCKAGKLDEALKLFEEMVEKGIKPSVVTYNTLIDGLCKAGKLDEALKLFEEMVEKGIKPSVVTYNTLIDGLCKAGKLDEALKLFEEMVEKGIKPDVVTYNTLIDGLCKAGKLDEALKLFEEMVEKGIKPSVVTYNTLIDGLCKAGKLDEALKLFEEMVEKGIKPSELTYNTLISGLGKAGRARDPPVLSSGDYKDHDGDYKDHDIDYKDDDDKMAGR

SEQ ID NO: 346 - protein, 738 aa, Artificial Sequence
  Synthesized Sequence
MAGYPYDVPDYAPKKKRKVEDPKKKRKVEDPKKKRKVGGSGGHMGSGGSRLHMGNSVVTYNTLIDGLCKAGKLDEALKLFEEMVEKGIKPSVVTYNTLIDGLCKAGKLDEALKLFEEMVEKGIKPSVVTYNTLIDGLCKAGKLDEALKLFEEMVEKGIKPSVVTYNTLIDGLCKAGKLDEALKLFEEMVEKGIKPDVVTYNTLIDGLCKAGKLDEALKLFEEMVEKGIKPSVVTYNTLIDGLCKAGKLDEALKLFEEMVEKGIKPSVVTYNTLIDGLCKAGKLDEALKLFEEMVEKGIKPDVVTYNTLIDGLCKAGKLDEALKLFEEMVEKGIKPSVVTYNTLIDGLCKAGKLDEALKLFEEMVEKGIKPSVVTYNTLIDGLCKAGKLDEALKLFEEMVEKGIKPSVVTYNTLIDGLCKAGKLDEALKLFEEMVEKGIKPDVVTYTTLIDGLCKAGKLDEALKLFEEMVEKGIKPDVVTYTTLIDGLCKAGKLDEALKLFEEMVEKGIKPDVVTYNTLIDGLCKAGKLDEALKLFEEMVEKGIKPSVVTYNTLIDGLCKAGKLDEALKLFEEMVEKGIKPDVVTYNTLIDGLCKAGKLDEALKLFEEMVEKGIKPSVVTYTTLIDGLCKAGKLDEALKLFEEMVEKGIKPNVVTYTTLIDGLCKAGKLDEALKLFEEMVEKGIKPDELTYNTLISGLGKAGRARDPPVLSSGDYKDHDGDYKDHDIDYKDDDDKMAGR

SEQ ID NO: 347 - protein, 738 aa, Artificial Sequence
  Synthesized Sequence
MAGYPYDVPDYAPKKKRKVEDPKKKRKVEDPKKKRKVGGSGGHMGSGGSRLHMGNSVVTYTTLIDGLCKAGKLDEALKLFEEMVEKGIKPDVVTYNTLIDGLCKAGKLDEALKLFEEMVEKGIKPSVVTYNTLIDGLCKAGKLDEALKLFEEMVEKGIKPDVVTYNTLIDGLCKAGKLDEALKLFEEMVEKGIKPSVVTYTTLIDGLCKAGKLDEALKLFEEMVEKGIKPNVVTYTTLIDGLCKAGKLDEALKLFEEMVEKGIKPDVVTYTTLIDGLCKAGKLDEALKLFEEMVEKGIKPDVVTYTTLIDGLCKAGKLDEALKLFEEMVEKGIKPNVVTYNTLIDGLCKAGKLDEALKLFEEMVEKGIKPDVVTYNTLIDGLCKAGKLDEALKLFEEMVEKGIKPSVVTYNTLIDGLCKAGKLDEALKLFEEMVEKGIKPSVVTYTTLIDGLCKAGKLDEALKLFEEMVEKGIKPNVVTYTTLIDGLCKAGKLDEALKLFEEMVEKGIKPDVVTYTTLIDGLCKAGKLDEALKLFEEMVEKGIKPDVVTYNTLIDGLCKAGKLDEALKLFEEMVEKGIKPSVVTYTTLIDGLCKAGKLDEALKLFEEMVEKGIKPDVVTYTTLIDGLCKAGKLDEALKLFEEMVEKGIKPNVVTYNTLIDGLCKAGKLDEALKLFEEMVEKGIKPDELTYNTLISGLGKAGRARDPPVLSSGDYKDHDGDYKDHDIDYKDDDDKMAGR

SEQ ID NO: 348 - protein, 738 aa, Artificial Sequence
  Synthesized Sequence
MAGYPYDVPDYAPKKKRKVEDPKKKRKVEDPKKKRKVGGSGGHMGSGGSRLHMGNSVVTYTTLIDGLCKAGKLDEALKLFEEMVEKGIKPDVVTYTTLIDGLCKAGKLDEALKLFEEMVEKGIKPDVVTYNTLIDGLCKAGKLDEALKLFEEMVEKGIKPSVVTYTTLIDGLCKAGKLDEALKLFEEMVEKGIKPDVVTYTTLIDGLCKAGKLDEALKLFEEMVEKGIKPNVVTYNTLIDGLCKAGKLDEALKLFEEMVEKGIKPDVVTYTTLIDGLCKAGKLDEALKLFEEMVEKGIKPNVVTYNTLIDGLCKAGKLDEALKLFEEMVEKGIKPDVVTYNTLIDGLCKAGKLDEALKLFEEMVEKGIKPSVVTYNTLIDGLCKAGKLDEALKLFEEMVEKGIKPSVVTYTTLIDGLCKAGKLDEALKLFEEMVEKGIKPDVVTYTTLIDGLCKAGKLDEALKLFEEMVEKGIKPDVVTYTTLIDGLCKAGKLDEALKLFEEMVEKGIKPNVVTYTTLIDGLCKAGKLDEALKLFEEMVEKGIKPNVVTYTTLIDGLCKAGKLDEALKLFEEMVEKGIKPDVVTYTTLIDGLCKAGKLDEALKLFEEMVEKGIKPNVVTYTTLIDGLCKAGKLDEALKLFEEMVEKGIKPNVVTYNTLIDGLCKAGKLDEALKLFEEMVEKGIKPDELTYNTLISGLGKAGRARDPPVLSSGDYKDHDGDYKDHDIDYKDDDDKMAGR

SEQ ID NO: 349 - protein, 738 aa, Artificial Sequence
  Synthesized Sequence
MAGYPYDVPDYAPKKKRKVEDPKKKRKVEDPKKKRKVGGSGGHMGSGGSRLHMGNSVVTYNTLIDGLCKAGRLDEAEELLEEMEEKGIKPDVVTYTTLIDGLCKAGKVDEALELFDEMKERGIKPDVVTYNTLIDGLCKSGKIEEALKLFKEMEEKGITPSVVTYNTLIDGLCKSGKIEEALKLFKEMEEKGITPSVVTYNTLIDGLCKSGKIEEALKLFKEMEEKGITPSVVTYNTLIDGLCKSGKIEEALKLFKEMEEKGITPSVVTYTTLIDGLCKAGDVDEALELFKEMRSKGVKPNVVTYNTLIDGLCKSGKIEEALKLFKEMEEKGITPSVVTYTTLIDGLCKAGDVDEALELFKEMRSKGVKPNVVTYTTLIDGLCKAGKVDEALELFDEMKERGIKPDVVTYNTLIDGLCKSGKIEEALKLFKEMEEKGITPSVVTYNTLIDGLCKAGRLDEAEELLEEMEEKGIKPDVVTYNTLIDGLCKAGRLDEAEELLEEMEEKGIKPDVVTYNTLIDGLCKAGRLDEAEELLEEMEEKGIKPDVVTYTTLIDGLCKAGDVDEALELFKEMRSKGVKPNVVTYTTLIDGLCKAGDVDEALELFKEMRSKGVKPNVVTYTTLIDGLCKAGKVDEALELFDEMKERGIKPDVVTYTTLIDGLCKAGKVDEALELFDEMKERGIKPDELTYNTLISGLGKAGRARDPPVLSSGDYKDHDGDYKDHDIDYKDDDDKMAGR

SEQ ID NO: 350 - protein, 738 aa, Artificial Sequence
  Synthesized Sequence
MAGYPYDVPDYAPKKKRKVEDPKKKRKVEDPKKKRKVGGSGGHMGSGGSRLHMGNSVVTYTTLIDGLCKAGKVDEALELFDEMKERGIKPDVVTYNTLIDGLCKSGKIEEALKLFKEMEEKGITPSVVTYNTLIDGLCKAGRLDEAEELLEEMEEKGIKPDVVTYTTLIDGLCKAGDVDEALELFKEMRSKGVKPNVVTYTTLIDGLCKAGDVDEALELFKEMRSKGVKPNVVTYNTLIDGLCKSGKIEEALKLFKEMEEKGITPSVVTYNTLIDGLCKSGKIEEALKLFKEMEEKGITPSVVTYNTLIDGLCKAGRLDEAEELLEEMEEKGIKPDVVTYNTLIDGLCKSGKIEEALKLFKEMEEKGITPSVVTYNTLIDGLCKAGRLDEAEELLEEMEEKGIKPDVVTYTTLIDGLCKAGKVDEALELFDEMKERGIKPDVVTYNTLIDGLCKSGKIEEALKLFKEMEEKGITPSVVTYTTLIDGLCKAGKVDEALELFDEMKERGIKPDVVTYNTLIDGLCKSGKIEEALKLFKEMEEKGITPSVVTYNTLIDGLCKAGRLDEAEELLEEMEEKGIKPDVVTYNTLIDGLCKAGRLDEAEELLEEMEEKGIKPDVVTYNTLIDGLCKSGKIEEALKLFKEMEEKGITPSVVTYNTLIDGLCKAGRLDEAEELLEEMEEKGIKPDELTYNTLISGLGKAGRARDPPVLSSGDYKDHDGDYKDHDIDYKDDDDKMAGR

SEQ ID NO: 351 - protein, 738 aa, Artificial Sequence
  Synthesized Sequence
MAGYPYDVPDYAPKKKRKVEDPKKKRKVEDPKKKRKVGGSGGHMGSGGSRLHMGNSVVTYTTLIDGLCKAGKVDEALELFDEMKERGIKPDVVTYNTLIDGLCKSGKIEEALKLFKEMEEKGITPSVVTYNTLIDGLCKAGRLDEAEELLEEMEEKGIKPDVVTYNTLIDGLCKAGRLDEAEELLEEMEEKGIKPDVVTYNTLIDGLCKSGKIEEALKLFKEMEEKGITPSVVTYNTLIDGLCKAGRLDEAEELLEEMEEKGIKPDVVTYNTLIDGLCKAGRLDEAEELLEEMEEKGIKPDVVTYNTLIDGLCKSGKIEEALKLFKEMEEKGITPSVVTYNTLIDGLCKSGKIEEALKLFKEMEEKGITPSVVTYNTLIDGLCKSGKIEEALKLFKEMEEKGITPSVVTYNTLIDGLCKAGRLDEAEELLEEMEEKGIKPDVVTYNTLIDGLCKAGRLDEAEELLEEMEEKGIKPDVVTYNTLIDGLCKSGKIEEALKLFKEMEEKGITPSVVTYNTLIDGLCKSGKIEEALKLFKEMEEKGITPSVVTYNTLIDGLCKSGKIEEALKLFKEMEEKGITPSVVTYNTLIDGLCKAGRLDEAEELLEEMEEKGIKPDVVTYNTLIDGLCKSGKIEEALKLFKEMEEKGITPSVVTYNTLIDGLCKSGKIEEALKLFKEMEEKGITPSELTYNTLISGLGKAGRARDPPVLSSGDYKDHDGDYKDHDIDYKDDDDKMAGR

SEQ ID NO: 352 - protein, 738 aa, Artificial Sequence
  Synthesized Sequence
MAGYPYDVPDYAPKKKRKVEDPKKKRKVEDPKKKRKVGGSGGHMGSGGSRLHMGNSVVTYNTLIDGLCKSGKIEEALKLFKEMEEKGITPSVVTYNTLIDGLCKSGKIEEALKLFKEMEEKGITPSVVTYNTLIDGLCKSGKIEEALKLFKEMEEKGITPSVVTYNTLIDGLCKAGRLDEAEELLEEMEEKGIKPDVVTYNTLIDGLCKSGKIEEALKLFKEMEEKGITPSVVTYNTLIDGLCKSGKIEEALKLFKEMEEKGITPSVVTYNTLIDGLCKAGRLDEAEELLEEMEEKGIKPDVVTYNTLIDGLCKSGKIEEALKLFKEMEEKGITPSVVTYNTLIDGLCKSGKIEEALKLFKEMEEKGITPSVVTYNTLIDGLCKSGKIEEALKLFKEMEEKGITPSVVTYNTLIDGLCKAGRLDEAEELLEEMEEKGIKPDVVTYTTLIDGLCKAGKVDEALELFDEMKERGIKPDVVTYTTLIDGLCKAGKVDEALELFDEMKERGIKPDVVTYNTLIDGLCKSGKIEEALKLFKEMEEKGITPSVVTYNTLIDGLCKAGRLDEAEELLEEMEEKGIKPDVVTYNTLIDGLCKSGKIEEALKLFKEMEEKGITPSVVTYTTLIDGLCKAGDVDEALELFKEMRSKGVKPNVVTYTTLIDGLCKAGKVDEALELFDEMKERGIKPDELTYNTLISGLGKAGRARDPPVLSSGDYKDHDGDYKDHDIDYKDDDDKMAGR

SEQ ID NO: 353 - protein, 738 aa, Artificial Sequence
  Synthesized Sequence
MAGYPYDVPDYAPKKKRKVEDPKKKRKVEDPKKKRKVGGSGGHMGSGGSRLHMGNSVVTYTTLIDGLCKAGKVDEALELFDEMKERGIKPDVVTYNTLIDGLCKSGKIEEALKLFKEMEEKGITPSVVTYNTLIDGLCKAGRLDEAEELLEEMEEKGIKPDVVTYNTLIDGLCKSGKIEEALKLFKEMEEKGITPSVVTYTTLIDGLCKAGDVDEALELFKEMRSKGVKPNVVTYTTLIDGLCKAGKVDEALELFDEMKERGIKPDVVTYTTLIDGLCKAGKVDEALELFDEMKERGIKPDVVTYTTLIDGLCKAGDVDEALELFKEMRSKGVKPNVVTYNTLIDGLCKAGRLDEAEELLEEMEEKGIKPDVVTYNTLIDGLCKSGKIEEALKLFKEMEEKGITPSVVTYNTLIDGLCKSGKIEEALKLFKEMEEKGITPSVVTYTTLIDGLCKAGDVDEALELFKEMRSKGVKPNVVTYTTLIDGLCKAGKVDEALELFDEMKERGIKPDVVTYTTLIDGLCKAGKVDEALELFDEMKERGIKPDVVTYNTLIDGLCKSGKIEEALKLFKEMEEKGITPSVVTYTTLIDGLCKAGKVDEALELFDEMKERGIKPDVVTYTTLIDGLCKAGDVDEALELFKEMRSKGVKPNVVTYNTLIDGLCKAGRLDEAEELLEEMEEKGIKPDELTYNTLISGLGKAGRARDPPVLSSGDYKDHDGDYKDHDIDYKDDDDKMAGR

SEQ ID NO: 354 - protein, 738 aa, Artificial Sequence
  Synthesized Sequence
MAGYPYDVPDYAPKKKRKVEDPKKKRKVEDPKKKRKVGGSGGHMGSGGSRLHMGNSVVTYTTLIDGLCKAGKVDEALELFDEMKERGIKPDVVTYTTLIDGLCKAGKVDEALELFDEMKERGIKPDVVTYNTLIDGLCKSGKIEEALKLFKEMEEKGITPSVVTYTTLIDGLCKAGKVDEALELFDEMKERGIKPDVVTYTTLIDGLCKAGDVDEALELFKEMRSKGVKPNVVTYNTLIDGLCKAGRLDEAEELLEEMEEKGIKPDVVTYTTLIDGLCKAGDVDEALELFKEMRSKGVKPNVVTYNTLIDGLCKAGRLDEAEELLEEMEEKGIKPDVVTYNTLIDGLCKSGKIEEALKLFKEMEEKGITPSVVTYNTLIDGLCKSGKIEEALKLFKEMEEKGITPSVVTYTTLIDGLCKAGKVDEALELFDEMKERGIKPDVVTYTTLIDGLCKAGKVDEALELFDEMKERGIKPDVVTYTTLIDGLCKAGDVDEALELFKEMRSKGVKPNVVTYTTLIDGLCKAGDVDEALELFKEMRSKGVKPNVVTYTTLIDGLCKAGKVDEALELFDEMKERGIKPDVVTYTTLIDGLCKAGDVDEALELFKEMRSKGVKPNVVTYTTLIDGLCKAGDVDEALELFKEMRSKGVKPNVVTYNTLIDGLCKAGRLDEAEELLEEMEEKGIKPDELTYNTLISGLGKAGRARDPPVLSSGDYKDHDGDYKDHDIDYKDDDDKMAGR

SEQ ID NO: 355 - DNA, 21 bp, Artificial Sequence
  Synthesized Sequence
caaagtggaggacccagtacc

SEQ ID NO: 356 - DNA, 21 bp, Artificial Sequence
  Synthesized Sequence
gcgcatgaactccttgatgac

SEQ ID NO: 357 - DNA, 1029 bp, Artificial Sequence
  Synthesized Sequence
atggccggagtgttcacactggaggacttcgtgggcgactggagacagaccgccggctacaacctggaccaggtgctggagcagggcggagtgagcagcctgtttcagaacctgggcgtgagcgtcacccccatccagaggatcgtgctgtccggcgagaatggcctgaagatcgacatccacgtcatcatcccctacgagggcctgagcggcgatcagatgggccagatcgagaagatcttcaaggtggtgtatcccgtcgacgaccaccacttcaaggtgatcctgcattacggcaccctcgtgatcgacggcgtgacccctaacatgatcgactacttcggcaggccctacgagggaatcgccgtgttcgacggaaagaagatcaccgtgaccggcaccctgtggaacggaaacaagatcatcgacgagaggctgatcaaccccgacggctccctgctgttcagggtgaccatcaatggcgtgaccggctggagactgtgcgagagaatcctggccggaggcggaggaagcctcgtgcccagaggatccggcggaggcggctccagccggctccatgcttctaactttactcagttcgttctcgtcgacaatggcggaactggcgacgtgactgtcgccccaagcaacttcgctaacggggtcgctgaatggatcagctctaactcgcgttcacaggcttacaaagtaacctgtagcgttcgtcagagctctgcgcagaatcgcaaatacaccatcaaagtcgaggtgcctaaagtggcaacccagactgttggtggtgtagagcttcctgtagccgcatggcgttcgtacctaaatatggaactaaccattccaattttcgccacgaattccgactgcgagcttattgttaaggcaatgcaaggtctcctaaaagatggaaacccgattccctcagcaatcgcagcaaactccggcatctacctcagtagcggctccggcggcagcgggggaggcgggcatcatcaccatcaccacggacgctag

SEQ ID NO: 358 - DNA, 105 bp, Artificial Sequence
  Synthesized Sequence
gtcacatacaccacactgatcgacggactgtgtaaagccggcgacgtggacgaagccctcgagctgttcaaagagatgcggagcaagggcgtgaagcccaacgtg

SEQ ID NO: 359 - DNA, 105 bp, Artificial Sequence
  Synthesized Sequence
gtcacatacaacaccctgatcgacggcctgtgcaaggccggcagactggatgaggccgaggagctgctggaggagatggaggagaagggcatcaagcccgacgtg

SEQ ID NO: 360 - DNA, 105 bp, Artificial Sequence
  Synthesized Sequence
gtcacatacaccaccctgatcgacggcctgtgcaaggccggcaaggtggatgaggccctggagctgttcgacgagatgaaggagaggggcatcaagcccgacgtg

SEQ ID NO: 361 - DNA, 105 bp, Artificial Sequence
  Synthesized Sequence
gtcacatacaacaccctgatcgacggcctgtgcaagagcggcaagatcgaggaggccctgaagctgttcaaggagatggaggagaagggcatcacccccagcgtg

SEQ ID NO: 362 - DNA, 105 bp, Artificial Sequence
  Synthesized Sequence
gtcacatacaccaccctgatcgacggcctgtgcaaggccggcaaagtggacgaggccctggagctgttcgacgagatgaaggagaggggcatcaagcccgacgtg

SEQ ID NO: 363 - DNA, 105 bp, Artificial Sequence
  Synthesized Sequence
gtgacatacaccacactgatcgacggactgtgtaaagccggcgacgtggacgaagccctcgagctgttcaaagagatgcggagcaagggcgtgaagcccaacgtg

SEQ ID NO: 364 - DNA, 105 bp, Artificial Sequence
  Synthesized Sequence
gtgacatacaacaccctgatcgacggcctgtgcaaggccggcagactggatgaggccgaggagctgctggaggagatggaggagaagggcatcaagcccgacgtg

SEQ ID NO: 365 - DNA, 105 bp, Artificial Sequence
  Synthesized Sequence
gtgacatacaccaccctgatcgacggcctgtgcaaggccggcaaggtggatgaggccctggagctgttcgacgagatgaaggagaggggcatcaagcccgacgtg

SEQ ID NO: 366 - DNA, 105 bp, Artificial Sequence
  Synthesized Sequence
gtgacatacaacaccctgatcgacggcctgtgcaagagcggcaagatcgaggaggccctgaagctgttcaaggagatggaggagaagggcatcacccccagcgtg

SEQ ID NO: 367 - DNA, 105 bp, Artificial Sequence
  Synthesized Sequence
gtgacatacaccaccctgatcgacggcctgtgcaaggccggcaaagtggacgaggccctggagctgttcgacgagatgaaggagaggggcatcaagcccgacgtg

SEQ ID NO: 368 - DNA, 105 bp, Artificial Sequence
  Synthesized Sequence
gttacatacaccacactgatcgacggactgtgtaaagccggcgacgtggacgaagccctcgagctgttcaaagagatgcggagcaagggcgtgaagcccaacgtg

SEQ ID NO: 369 - DNA, 105 bp, Artificial Sequence
  Synthesized Sequence
gttacatacaacaccctgatcgacggcctgtgcaaggccggcagactggatgaggccgaggagctgctggaggagatggaggagaagggcatcaagcccgacgtg

SEQ ID NO: 370 - DNA, 105 bp, Artificial Sequence
  Synthesized Sequence
gttacatacaccaccctgatcgacggcctgtgcaaggccggcaaggtggatgaggccctggagctgttcgacgagatgaaggagaggggcatcaagcccgacgtg

SEQ ID NO: 371 - DNA, 105 bp, Artificial Sequence
  Synthesized Sequence
gttacatacaacaccctgatcgacggcctgtgcaagagcggcaagatcgaggaggccctgaagctgttcaaggagatggaggagaagggcatcacccccagcgtg

SEQ ID NO: 372 - DNA, 105 bp, Artificial Sequence
  Synthesized Sequence
gttacatacaccaccctgatcgacggcctgtgcaaggccggcaaagtggacgaggccctggagctgttcgacgagatgaaggagaggggcatcaagcccgacgtg

SEQ ID NO: 373 - DNA, 105 bp, Artificial Sequence
  Synthesized Sequence
gtcacatacaccacgctgatcgatggtctgtgtaaggccggcaaattagatgaggccctgaagttattcgaagagatggttgaaaaaggcatcaagccgaacgtg

SEQ ID NO: 374 - DNA, 105 bp, Artificial Sequence
  Synthesized Sequence
gtcacatacaacaccctgattgatggcttatgcaaagcgggtaagctggatgaagcgttaaaactgtttgaggaaatggtggagaagggtattaaaccgagcgtg

SEQ ID NO: 375 - DNA, 105 bp, Artificial Sequence
  Synthesized Sequence
gtcacatacaccacgctgatcgatggtctgtgtaaggccggtaaattagatgaagcgctgaagttattcgaagagatggttgaaaaaggtatcaagccggatgtg

SEQ ID NO: 376 - DNA, 105 bp, Artificial Sequence
  Synthesized Sequence
gtcacatacaatacgctgattgatggcttatgtaaagcgggtaagctggatgaggccttaaaactgtttgaggaaatggtggagaagggcattaaaccggatgtg

SEQ ID NO: 377 - DNA, 105 bp, Artificial Sequence
  Synthesized Sequence
gtcacatacaccacgctgatcgatggtctgtgtaaggccggtaaattagatgaagcgctgaagttattcgaagagatggttgaaaaaggtatcaagccggacgtg

SEQ ID NO: 378 - DNA, 105 bp, Artificial Sequence
  Synthesized Sequence
gtcacatacaatacgctgattgatggcttatgtaaagcgggtaagctggatgaggccttaaaactgtttgaggaaatggtggagaagggcattaaaccggacgtg

SEQ ID NO: 379 - DNA, 105 bp, Artificial Sequence
  Synthesized Sequence
gtgacatacaccacgctgatcgatggtctgtgtaaggccggcaaattagatgaggccctgaagttattcgaagagatggttgaaaaaggcatcaagccgaacgtg

SEQ ID NO: 380 - DNA, 105 bp, Artificial Sequence
  Synthesized Sequence
gtgacatacaacaccctgattgatggcttatgcaaagcgggtaagctggatgaagcgttaaaactgtttgaggaaatggtggagaagggtattaaaccgagcgtg

SEQ ID NO: 381 - DNA, 105 bp, Artificial Sequence
  Synthesized Sequence
gtgacatacaccacgctgatcgatggtctgtgtaaggccggtaaattagatgaagcgctgaagttattcgaagagatggttgaaaaaggtatcaagccggatgtg

SEQ ID NO: 382 - DNA, 105 bp, Artificial Sequence
  Synthesized Sequence
gtgacatacaatacgctgattgatggcttatgtaaagcgggtaagctggatgaggccttaaaactgtttgaggaaatggtggagaagggcattaaaccggatgtg

SEQ ID NO: 383 - DNA, 105 bp, Artificial Sequence
  Synthesized Sequence
gtgacatacaccacgctgatcgatggtctgtgtaaggccggtaaattagatgaagcgctgaagttattcgaagagatggttgaaaaaggtatcaagccggacgtg

SEQ ID NO: 384 - DNA, 105 bp, Artificial Sequence
  Synthesized Sequence
gtgacatacaatacgctgattgatggcttatgtaaagcgggtaagctggatgaggccttaaaactgtttgaggaaatggtggagaagggcattaaaccggacgtg

SEQ ID NO: 385 - DNA, 105 bp, Artificial Sequence
  Synthesized Sequence
gttacatacaccacgctgatcgatggtctgtgtaaggccggcaaattagatgaggccctgaagttattcgaagagatggttgaaaaaggcatcaagccgaacgtg

SEQ ID NO: 386 - DNA, 105 bp, Artificial Sequence
  Synthesized Sequence
gttacatacaacaccctgattgatggcttatgcaaagcgggtaagctggatgaagcgttaaaactgtttgaggaaatggtggagaagggtattaaaccgagcgtg

SEQ ID NO: 387 - DNA, 105 bp, Artificial Sequence
  Synthesized Sequence
gttacatacaccacgctgatcgatggtctgtgtaaggccggtaaattagatgaagcgctgaagttattcgaagagatggttgaaaaaggtatcaagccggatgtg

SEQ ID NO: 388 - DNA, 105 bp, Artificial Sequence
  Synthesized Sequence
gttacatacaatacgctgattgatggcttatgtaaagcgggtaagctggatgaggccttaaaactgtttgaggaaatggtggagaagggcattaaaccggatgtg

SEQ ID NO: 389 - DNA, 105 bp, Artificial Sequence
  Synthesized Sequence
gttacatacaccacgctgatcgatggtctgtgtaaggccggtaaattagatgaagcgctgaagttattcgaagagatggttgaaaaaggtatcaagccggacgtg

SEQ ID NO: 390 - DNA, 105 bp, Artificial Sequence
  Synthesized Sequence
gttacatacaatacgctgattgatggcttatgtaaagcgggtaagctggatgaggccttaaaactgtttgaggaaatggtggagaagggcattaaaccggacgtg

SEQ ID NO: 391 - protein, 869 aa, Artificial Sequence
  Synthesized Sequence
MAGVFTLEDFVGDWRQTAGYNLDQVLEQGGVSSLFQNLGVSVTPIQRIVLSGENGLKIDIHVIIPYEGLSGDQMGQIEKIFKVVYPVDDHHFKVILHYGTLVIDGVTPNMIDYFGRPYEGIAVFDGKKITVTGTLWNGNKIIDERLINPDGSLLFRVTINGVTGWRLCERILAGGGGSLVPRGSGGGGSSRLHMGNSVVTYTTLIDGLCKAGKLDEALKLFEEMVEKGIKPDVVTYTTLIDGLCKAGKLDEALKLFEEMVEKGIKPNVVTYTTLIDGLCKAGKLDEALKLFEEMVEKGIKPNVVTYNTLIDGLCKAGKLDEALKLFEEMVEKGIKPDVVTYTTLIDGLCKAGKLDEALKLFEEMVEKGIKPDVVTYTTLIDGLCKAGKLDEALKLFEEMVEKGIKPNVVTYTTLIDGLCKAGKLDEALKLFEEMVEKGIKPNVVTYNTLIDGLCKAGKLDEALKLFEEMVEKGIKPSVVTYNTLIDGLCKAGKLDEALKLFEEMVEKGIKPDVVTYNTLIDGLCKAGKLDEALKLFEEMVEKGIKPSVVTYNTLIDGLCKAGKLDEALKLFEEMVEKGIKPDVVTYNTLIDGLCKAGKLDEALKLFEEMVEKGIKPDVVTYNTLIDGLCKAGKLDEALKLFEEMVEKGIKPSVVTYNTLIDGLCKAGKLDEALKLFEEMVEKGIKPSVVTYTTLIDGLCKAGKLDEALKLFEEMVEKGIKPDVVTYTTLIDGLCKAGKLDEALKLFEEMVEKGIKPDVVTYTTLIDGLCKAGKLDEALKLFEEMVEKGIKPDVVTYTTLIDGLCKAGKLDEALKLFEEMVEKGIKPNELTYNTLISGLGKAGRARDPPVLSSGSGGSGGGGHHHHHHGR

SEQ ID NO: 392 - protein, 869 aa, Artificial Sequence
  Synthesized Sequence
MAGVFTLEDFVGDWRQTAGYNLDQVLEQGGVSSLFQNLGVSVTPIQRIVLSGENGLKIDIHVIIPYEGLSGDQMGQIEKIFKVVYPVDDHHFKVILHYGTLVIDGVTPNMIDYFGRPYEGIAVFDGKKITVTGTLWNGNKIIDERLINPDGSLLFRVTINGVTGWRLCERILAGGGGSLVPRGSGGGGSSRLHMGNSVVTYTTLIDGLCKAGKLDEALKLFEEMVEKGIKPDVVTYTTLIDGLCKAGKLDEALKLFEEMVEKGIKPNVVTYTTLIDGLCKAGKLDEALKLFEEMVEKGIKPDVVTYTTLIDGLCKAGKLDEALKLFEEMVEKGIKPNVVTYTTLIDGLCKAGKLDEALKLFEEMVEKGIKPDVVTYTTLIDGLCKAGKLDEALKLFEEMVEKGIKPDVVTYTTLIDGLCKAGKLDEALKLFEEMVEKGIKPNVVTYTTLIDGLCKAGKLDEALKLFEEMVEKGIKPNVVTYTTLIDGLCKAGKLDEALKLFEEMVEKGIKPDVVTYNTLIDGLCKAGKLDEALKLFEEMVEKGIKPSVVTYNTLIDGLCKAGKLDEALKLFEEMVEKGIKPSVVTYNTLIDGLCKAGKLDEALKLFEEMVEKGIKPDVVTYTTLIDGLCKAGKLDEALKLFEEMVEKGIKPDVVTYTTLIDGLCKAGKLDEALKLFEEMVEKGIKPNVVTYTTLIDGLCKAGKLDEALKLFEEMVEKGIKPDVVTYTTLIDGLCKAGKLDEALKLFEEMVEKGIKPNVVTYTTLIDGLCKAGKLDEALKLFEEMVEKGIKPDVVTYNTLIDGLCKAGKLDEALKLFEEMVEKGIKPDELTYNTLISGLGKAGRARDPPVLSSGSGGSGGGGHHHHHHGR

SEQ ID NO: 393 - protein, 869 aa, Artificial Sequence
  Synthesized Sequence
MAGVFTLEDFVGDWRQTAGYNLDQVLEQGGVSSLFQNLGVSVTPIQRIVLSGENGLKIDIHVIIPYEGLSGDQMGQIEKIFKVVYPVDDHHFKVILHYGTLVIDGVTPNMIDYFGRPYEGIAVFDGKKITVTGTLWNGNKIIDERLINPDGSLLFRVTINGVTGWRLCERILAGGGGSLVPRGSGGGGSSRLHMGNSVVTYNTLIDGLCKAGKLDEALKLFEEMVEKGIKPSVVTYNTLIDGLCKAGKLDEALKLFEEMVEKGIKPDVVTYTTLIDGLCKAGKLDEALKLFEEMVEKGIKPDVVTYTTLIDGLCKAGKLDEALKLFEEMVEKGIKPNVVTYTTLIDGLCKAGKLDEALKLFEEMVEKGIKPDVVTYNTLIDGLCKAGKLDEALKLFEEMVEKGIKPDVVTYNTLIDGLCKAGKLDEALKLFEEMVEKGIKPSVVTYTTLIDGLCKAGKLDEALKLFEEMVEKGIKPNVVTYNTLIDGLCKAGKLDEALKLFEEMVEKGIKPDVVTYTTLIDGLCKAGKLDEALKLFEEMVEKGIKPNVVTYTTLIDGLCKAGKLDEALKLFEEMVEKGIKPNVVTYNTLIDGLCKAGKLDEALKLFEEMVEKGIKPSVVTYNTLIDGLCKAGKLDEALKLFEEMVEKGIKPSVVTYTTLIDGLCKAGKLDEALKLFEEMVEKGIKPNVVTYTTLIDGLCKAGKLDEALKLFEEMVEKGIKPDVVTYNTLIDGLCKAGKLDEALKLFEEMVEKGIKPSVVTYNTLIDGLCKAGKLDEALKLFEEMVEKGIKPSVVTYNTLIDGLCKAGKLDEALKLFEEMVEKGIKPDELTYNTLISGLGKAGRARDPPVLSSGSGGSGGGGHHHHHHGR

SEQ ID NO: 394 - protein, 869 aa, Artificial Sequence
  Synthesized Sequence
MAGVFTLEDFVGDWRQTAGYNLDQVLEQGGVSSLFQNLGVSVTPIQRIVLSGENGLKIDIHVIIPYEGLSGDQMGQIEKIFKVVYPVDDHHFKVILHYGTLVIDGVTPNMIDYFGRPYEGIAVFDGKKITVTGTLWNGNKIIDERLINPDGSLLFRVTINGVTGWRLCERILAGGGGSLVPRGSGGGGSSRLHMGNSVVTYNTLIDGLCKAGKLDEALKLFEEMVEKGIKPSVVTYTTLIDGLCKAGKLDEALKLFEEMVEKGIKPNVVTYNTLIDGLCKAGKLDEALKLFEEMVEKGIKPDVVTYTTLIDGLCKAGKLDEALKLFEEMVEKGIKPDVVTYTTLIDGLCKAGKLDEALKLFEEMVEKGIKPNVVTYTTLIDGLCKAGKLDEALKLFEEMVEKGIKPDVVTYTTLIDGLCKAGKLDEALKLFEEMVEKGIKPDVVTYTTLIDGLCKAGKLDEALKLFEEMVEKGIKPNVVTYNTLIDGLCKAGKLDEALKLFEEMVEKGIKPDVVTYNTLIDGLCKAGKLDEALKLFEEMVEKGIKPSVVTYTTLIDGLCKAGKLDEALKLFEEMVEKGIKPNVVTYNTLIDGLCKAGKLDEALKLFEEMVEKGIKPSVVTYNTLIDGLCKAGKLDEALKLFEEMVEKGIKPSVVTYNTLIDGLCKAGKLDEALKLFEEMVEKGIKPSVVTYTTLIDGLCKAGKLDEALKLFEEMVEKGIKPNVVTYNTLIDGLCKAGKLDEALKLFEEMVEKGIKPDVVTYTTLIDGLCKAGKLDEALKLFEEMVEKGIKPDVVTYNTLIDGLCKAGKLDEALKLFEEMVEKGIKPDELTYNTLISGLGKAGRARDPPVLSSGSGGSGGGGHHHHHHGR

SEQ ID NO: 395 - protein, 869 aa, Artificial Sequence
  Synthesized Sequence
MAGVFTLEDFVGDWRQTAGYNLDQVLEQGGVSSLFQNLGVSVTPIQRIVLSGENGLKIDIHVIIPYEGLSGDQMGQIEKIFKVVYPVDDHHFKVILHYGTLVIDGVTPNMIDYFGRPYEGIAVFDGKKITVTGTLWNGNKIIDERLINPDGSLLFRVTINGVTGWRLCERILAGGGGSLVPRGSGGGGSSRLHMGNSVVTYTTLIDGLCKAGKLDEALKLFEEMVEKGIKPDVVTYTTLIDGLCKAGKLDEALKLFEEMVEKGIKPDVVTYNTLIDGLCKAGKLDEALKLFEEMVEKGIKPSVVTYTTLIDGLCKAGKLDEALKLFEEMVEKGIKPNVVTYTTLIDGLCKAGKLDEALKLFEEMVEKGIKPNVVTYTTLIDGLCKAGKLDEALKLFEEMVEKGIKPNVVTYTTLIDGLCKAGKLDEALKLFEEMVEKGIKPNVVTYTTLIDGLCKAGKLDEALKLFEEMVEKGIKPNVVTYTTLIDGLCKAGKLDEALKLFEEMVEKGIKPDVVTYTTLIDGLCKAGKLDEALKLFEEMVEKGIKPNVVTYNTLIDGLCKAGKLDEALKLFEEMVEKGIKPDVVTYNTLIDGLCKAGKLDEALKLFEEMVEKGIKPSVVTYTTLIDGLCKAGKLDEALKLFEEMVEKGIKPNVVTYNTLIDGLCKAGKLDEALKLFEEMVEKGIKPSVVTYNTLIDGLCKAGKLDEALKLFEEMVEKGIKPDVVTYTTLIDGLCKAGKLDEALKLFEEMVEKGIKPDVVTYNTLIDGLCKAGKLDEALKLFEEMVEKGIKPDVVTYTTLIDGLCKAGKLDEALKLFEEMVEKGIKPNELTYNTLISGLGKAGRARDPPVLSSGSGGSGGGGHHHHHHGR

SEQ ID NO: 396 - protein, 869 aa, Artificial Sequence
  Synthesized Sequence
MAGVFTLEDFVGDWRQTAGYNLDQVLEQGGVSSLFQNLGVSVTPIQRIVLSGENGLKIDIHVIIPYEGLSGDQMGQIEKIFKVVYPVDDHHFKVILHYGTLVIDGVTPNMIDYFGRPYEGIAVFDGKKITVTGTLWNGNKIIDERLINPDGSLLFRVTINGVTGWRLCERILAGGGGSLVPRGSGGGGSSRLHMGNSVVTYTTLIDGLCKAGKVDEALELFDEMKERGIKPDVVTYTTLIDGLCKAGDVDEALELFKEMRSKGVKPNVVTYTTLIDGLCKAGDVDEALELFKEMRSKGVKPNVVTYNTLIDGLCKAGRLDEAEELLEEMEEKGIKPDVVTYTTLIDGLCKAGKVDEALELFDEMKERGIKPDVVTYTTLIDGLCKAGDVDEALELFKEMRSKGVKPNVVTYTTLIDGLCKAGDVDEALELFKEMRSKGVKPNVVTYNTLIDGLCKSGKIEEALKLFKEMEEKGITPSVVTYNTLIDGLCKAGRLDEAEELLEEMEEKGIKPDVVTYNTLIDGLCKSGKIEEALKLFKEMEEKGITPSVVTYNTLIDGLCKAGRLDEAEELLEEMEEKGIKPDVVTYNTLIDGLCKAGRLDEAEELLEEMEEKGIKPDVVTYNTLIDGLCKSGKIEEALKLFKEMEEKGITPSVVTYNTLIDGLCKSGKIEEALKLFKEMEEKGITPSVVTYTTLIDGLCKAGKVDEALELFDEMKERGIKPDVVTYTTLIDGLCKAGKVDEALELFDEMKERGIKPDVVTYTTLIDGLCKAGKVDEALELFDEMKERGIKPDVVTYTTLIDGLCKAGDVDEALELFKEMRSKGVKPNELTYNTLISGLGKAGRARDPPVLSSGSGGSGGGGHHHHHHGR

SEQ ID NO: 397 - protein, 869 aa, Artificial Sequence
  Synthesized Sequence
MAGVFTLEDFVGDWRQTAGYNLDQVLEQGGVSSLFQNLGVSVTPIQRIVLSGENGLKIDIHVIIPYEGLSGDQMGQIEKIFKVVYPVDDHHFKVILHYGTLVIDGVTPNMIDYFGRPYEGIAVFDGKKITVTGTLWNGNKIIDERLINPDGSLLFRVTINGVTGWRLCERILAGGGGSLVPRGSGGGGSSRLHMGNSVVTYTTLIDGLCKAGKVDEALELFDEMKERGIKPDVVTYTTLIDGLCKAGDVDEALELFKEMRSKGVKPNVVTYTTLIDGLCKAGKVDEALELFDEMKERGIKPDVVTYTTLIDGLCKAGDVDEALELFKEMRSKGVKPNVVTYTTLIDGLCKAGKVDEALELFDEMKERGIKPDVVTYTTLIDGLCKAGKVDEALELFDEMKERGIKPDVVTYTTLIDGLCKAGDVDEALELFKEMRSKGVKPNVVTYTTLIDGLCKAGDVDEALELFKEMRSKGVKPNVVTYTTLIDGLCKAGKVDEALELFDEMKERGIKPDVVTYNTLIDGLCKSGKIEEALKLFKEMEEKGITPSVVTYNTLIDGLCKSGKIEEALKLFKEMEEKGITPSVVTYNTLIDGLCKAGRLDEAEELLEEMEEKGIKPDVVTYTTLIDGLCKAGKVDEALELFDEMKERGIKPDVVTYTTLIDGLCKAGDVDEALELFKEMRSKGVKPNVVTYTTLIDGLCKAGKVDEALELFDEMKERGIKPDVVTYTTLIDGLCKAGDVDEALELFKEMRSKGVKPNVVTYTTLIDGLCKAGKVDEALELFDEMKERGIKPDVVTYNTLIDGLCKAGRLDEAEELLEEMEEKGIKPDELTYNTLISGLGKAGRARDPPVLSSGSGGSGGGGHHHHHHGR

SEQ ID NO: 398 - protein, 869 aa, Artificial Sequence
  Synthesized Sequence
MAGVFTLEDFVGDWRQTAGYNLDQVLEQGGVSSLFQNLGVSVTPIQRIVLSGENGLKIDIHVIIPYEGLSGDQMGQIEKIFKVVYPVDDHHFKVILHYGTLVIDGVTPNMIDYFGRPYEGIAVFDGKKITVTGTLWNGNKIIDERLINPDGSLLFRVTINGVTGWRLCERILAGGGGSLVPRGSGGGGSSRLHMGNSVVTYNTLIDGLCKSGKIEEALKLFKEMEEKGITPSVVTYNTLIDGLCKAGRLDEAEELLEEMEEKGIKPDVVTYTTLIDGLCKAGKVDEALELFDEMKERGIKPDVVTYTTLIDGLCKAGDVDEALELFKEMRSKGVKPNVVTYTTLIDGLCKAGKVDEALELFDEMKERGIKPDVVTYNTLIDGLCKAGRLDEAEELLEEMEEKGIKPDVVTYNTLIDGLCKSGKIEEALKLFKEMEEKGITPSVVTYTTLIDGLCKAGDVDEALELFKEMRSKGVKPNVVTYNTLIDGLCKAGRLDEAEELLEEMEEKGIKPDVVTYTTLIDGLCKAGDVDEALELFKEMRSKGVKPNVVTYTTLIDGLCKAGDVDEALELFKEMRSKGVKPNVVTYNTLIDGLCKSGKIEEALKLFKEMEEKGITPSVVTYNTLIDGLCKSGKIEEALKLFKEMEEKGITPSVVTYTTLIDGLCKAGDVDEALELFKEMRSKGVKPNVVTYTTLIDGLCKAGKVDEALELFDEMKERGIKPDVVTYNTLIDGLCKSGKIEEALKLFKEMEEKGITPSVVTYNTLIDGLCKSGKIEEALKLFKEMEEKGITPSVVTYNTLIDGLCKAGRLDEAEELLEEMEEKGIKPDELTYNTLISGLGKAGRARDPPVLSSGSGGSGGGGHHHHHHGR

SEQ ID NO: 399 - protein, 869 aa, Artificial Sequence
  Synthesized Sequence
MAGVFTLEDFVGDWRQTAGYNLDQVLEQGGVSSLFQNLGVSVTPIQRIVLSGENGLKIDIHVIIPYEGLSGDQMGQIEKIFKVVYPVDDHHFKVILHYGTLVIDGVTPNMIDYFGRPYEGIAVFDGKKITVTGTLWNGNKIIDERLINPDGSLLFRVTINGVTGWRLCERILAGGGGSLVPRGSGGGGSSRLHMGNSVVTYNTLIDGLCKSGKIEEALKLFKEMEEKGITPSVVTYTTLIDGLCKAGDVDEALELFKEMRSKGVKPNVVTYNTLIDGLCKAGRLDEAEELLEEMEEKGIKPDVVTYTTLIDGLCKAGKVDEALELFDEMKERGIKPDVVTYTTLIDGLCKAGDVDEALELFKEMRSKGVKPNVVTYTTLIDGLCKAGKVDEALELFDEMKERGIKPDVVTYTTLIDGLCKAGKVDEALELFDEMKERGIKPDVVTYTTLIDGLCKAGDVDEALELFKEMRSKGVKPNVVTYNTLIDGLCKAGRLDEAEELLEEMEEKGIKPDVVTYNTLIDGLCKSGKIEEALKLFKEMEEKGITPSVVTYTTLIDGLCKAGDVDEALELFKEMRSKGVKPNVVTYNTLIDGLCKSGKIEEALKLFKEMEEKGITPSVVTYNTLIDGLCKSGKIEEALKLFKEMEEKGITPSVVTYNTLIDGLCKSGKIEEALKLFKEMEEKGITPSVVTYTTLIDGLCKAGDVDEALELFKEMRSKGVKPNVVTYNTLIDGLCKAGRLDEAEELLEEMEEKGIKPDVVTYTTLIDGLCKAGKVDEALELFDEMKERGIKPDVVTYNTLIDGLCKAGRLDEAEELLEEMEEKGIKPDELTYNTLISGLGKAGRARDPPVLSSGSGGSGGGGHHHHHHGR

SEQ ID NO: 400 - protein, 869 aa, Artificial Sequence
  Synthesized Sequence
MAGVFTLEDFVGDWRQTAGYNLDQVLEQGGVSSLFQNLGVSVTPIQRIVLSGENGLKIDIHVIIPYEGLSGDQMGQIEKIFKVVYPVDDHHFKVILHYGTLVIDGVTPNMIDYFGRPYEGIAVFDGKKITVTGTLWNGNKIIDERLINPDGSLLFRVTINGVTGWRLCERILAGGGGSLVPRGSGGGGSSRLHMGNSVVTYTTLIDGLCKAGKVDEALELFDEMKERGIKPDVVTYTTLIDGLCKAGKVDEALELFDEMKERGIKPDVVTYNTLIDGLCKSGKIEEALKLFKEMEEKGITPSVVTYTTLIDGLCKAGDVDEALELFKEMRSKGVKPNVVTYTTLIDGLCKAGDVDEALELFKEMRSKGVKPNVVTYTTLIDGLCKAGDVDEALELFKEMRSKGVKPNVVTYTTLIDGLCKAGDVDEALELFKEMRSKGVKPNVVTYTTLIDGLCKAGDVDEALELFKEMRSKGVKPNVVTYTTLIDGLCKAGKVDEALELFDEMKERGIKPDVVTYTTLIDGLCKAGDVDEALELFKEMRSKGVKPNVVTYNTLIDGLCKAGRLDEAEELLEEMEEKGIKPDVVTYNTLIDGLCKSGKIEEALKLFKEMEEKGITPSVVTYTTLIDGLCKAGDVDEALELFKEMRSKGVKPNVVTYNTLIDGLCKSGKIEEALKLFKEMEEKGITPSVVTYNTLIDGLCKAGRLDEAEELLEEMEEKGIKPDVVTYTTLIDGLCKAGKVDEALELFDEMKERGIKPDVVTYNTLIDGLCKAGRLDEAEELLEEMEEKGIKPDVVTYTTLIDGLCKAGDVDEALELFKEMRSKGVKPNELTYNTLISGLGKAGRARDPPVLSSGSGGSGGGGHHHHHHGR

SEQ ID NO: 401 - protein, 35 aa, Artificial Sequence
  v3.1_A
VTYTTLIDGLCKAGKVDEALELFKEMRSKGVKPNV

SEQ ID NO: 402 - protein, 35 aa, Artificial Sequence
  1st_A
VTYTTNIDQLCKAGKVDEALELFKEMRSKGVKPNV

SEQ ID NO: 403 - protein, 35 aa, Artificial Sequence
  1st_C
VTYNTNIDQLCKSGKIEEALKLFKEMEEKGITPSV

SEQ ID NO: 404 - protein, 35 aa, Artificial Sequence
  1st_G
VTYTTNIDQLCKAGKVDEALELFDEMKERGIKPDV

SEQ ID NO: 405 - protein, 35 aa, Artificial Sequence
  1st_U
VTYNTNIDQLCKAGRLDEAEELLEEMEEKGIKPDV

SEQ ID NO: 406 - DNA, 105 bp, Artificial Sequence
  v3.1_A
gtgacctacaccacactgatcgacggactgtgcaaggccggcaaagtggatgaggctctggagctgtttaaggaaatgagaagcaagggcgtcaagcccaacgtg

SEQ ID NO: 407 - DNA, 105 bp, Artificial Sequence
  v3.2_A
gtcacatacaccaccaacatcgaccagctgtgcaaagccggcaaggtggatgaagctctggagctgttcaaggagatgagaagcaagggcgtgaagcccaacgtg

SEQ ID NO: 408 - DNA, 105 bp, Artificial Sequence
  v3.2_C
gtcacatacaacaccaacatcgaccagctgtgcaaaagcggcaagatcgaggaggctctgaaactgttcaaggagatggaggagaagggcatcacccccagcgtg

SEQ ID NO: 409 - DNA, 105 bp, Artificial Sequence
  v3.2_G
gtcacatacaccaccaacatcgaccagctctgcaaggccggcaaggtggatgaggctctggagctgttcgacgagatgaaggagagaggcatcaagcccgacgtg

SEQ ID NO: 410 - DNA, 105 bp, Artificial Sequence
  v3.2_U
gtcacatacaacaccaacatcgaccagctctgcaaggccggcagactggacgaggccgaagagctgctggaggagatggaggagaagggcatcaagcccgacgtg

SEQ ID NO: 411 - DNA, 2610 bp, Artificial Sequence
  v3.1_PPR1
atggccggagtgttcacactggaggacttcgtgggcgactggagacagaccgccggctacaacctggaccaggtgctggagcagggcggagtgagcagcctgtttcagaacctgggcgtgagcgtcacccccatccagaggatcgtgctgtccggcgagaatggcctgaagatcgacatccacgtcatcatcccctacgagggcctgagcggcgatcagatgggccagatcgagaagatcttcaaggtggtgtatcccgtcgacgaccaccacttcaaggtgatcctgcattacggcaccctcgtgatcgacggcgtgacccctaacatgatcgactacttcggcaggccctacgagggaatcgccgtgttcgacggaaagaagatcaccgtgaccggcaccctgtggaacggaaacaagatcatcgacgagaggctgatcaaccccgacggctccctgctgttcagggtgaccatcaatggcgtgaccggctggagactgtgcgagagaatcctggccggaggcggaggaagcctcgtgcccagaggatccggcggaggcggctccagccggctccatatgggaaactccgtggtcacatacaccaccctgatcgacggcctgtgcaaggccggcaaggtggatgaggccctggagctgttcgacgagatgaaggagaggggcatcaagcccgacgtggtcacatacaccacactgatcgacggactgtgtaaagccggcaaggtggacgaagccctcgagctgttcaaagagatgcggagcaagggcgtgaagcccaacgtggtgacatacaccacactgatcgacggactgtgtaaagccggcaaggtggacgaagccctcgagctgttcaaagagatgcggagcaagggcgtgaagcccaacgtggtcacatacaacaccctgatcgacggcctgtgcaaggccggcagactggatgaggccgaggagctgctggaggagatggaggagaagggcatcaagcccgacgtggttacatacaccaccctgatcgacggcctgtgcaaggccggcaaagtggacgaggccctggagctgttcgacgagatgaaggagaggggcatcaagcccgacgtggtcacatacaccacactgatcgacggactgtgtaaagccggcaaggtggacgaagccctcgagctgttcaaagagatgcggagcaagggcgtgaagcccaacgtggttacatacaccacactgatcgacggactgtgtaaagccggcaaggtggacgaagccctcgagctgttcaaagagatgcggagcaagggcgtgaagcccaacgtggtcacatacaacaccctgatcgacggcctgtgcaagagcggcaagatcgaggaggccctgaagctgttcaaggagatggaggagaagggcatcacccccagcgtggtgacatacaacaccctgatcgacggcctgtgcaaggccggcagactggatgaggccgaggagctgctggaggagatggaggagaagggcatcaagcccgacgtggtcacatacaacaccctgatcgacggcctgtgcaagagcggcaagatcgaggaggccctgaagctgttcaaggagatggaggagaagggcatcacccccagcgtggttacatacaacaccctgatcgacggcctgtgcaaggccggcagactggatgaggccgaggagctgctggaggagatggaggagaagggcatcaagcccgacgtggtcacatacaacaccctgatcgacggcctgtgcaaggccggcagactggatgaggccgaggagctgctggaggagatggaggagaagggcatcaagcccgacgtggtcacatacaacaccctgatcgacggcctgtgcaagagcggcaagatcgaggaggccctgaagctgttcaaggagatggaggagaagggcatcacccccagcgtggtcacatacaacaccctgatcgacggcctgtgcaagagcggcaagatcgaggaggccctgaagctgttcaaggagatggaggagaagggcatcacccccagcgtggttacatacaccaccctgatcgacggcctgtgcaaggccggcaaagtggacgaggccctggagctgttcgacgagatgaaggagaggggcatcaagcccgacgtggtcacatacaccaccctgatcgacggcctgtgcaaggccggcaaggtggatgaggccctggagctgttcgacgagatgaaggagaggggcatcaagcccgacgtggtgacatacaccaccctgatcgacggcctgtgcaaggccggcaaagtggacgaggccctggagctgttcgacgagatgaaggagaggggcatcaagcccgacgtggtcacatacaccacactgatcgacggactgtgtaaagccggcaaggtggacgaagccctcgagctgttcaaagagatgcggagcaagggcgtgaagcccaacgagctgacctacaacaccctgatcagcggcctgggcaaggccggcagagccagagacccccccgtgctcagtagcggctccggcggcagcgggggaggcgggcatcatcaccatcaccacggacgctag

SEQ ID NO: 412 - DNA, 2610 bp, Artificial Sequence
  v3.1_PPR2
atggccggagtgttcacactggaggacttcgtgggcgactggagacagaccgccggctacaacctggaccaggtgctggagcagggcggagtgagcagcctgtttcagaacctgggcgtgagcgtcacccccatccagaggatcgtgctgtccggcgagaatggcctgaagatcgacatccacgtcatcatcccctacgagggcctgagcggcgatcagatgggccagatcgagaagatcttcaaggtggtgtatcccgtcgacgaccaccacttcaaggtgatcctgcattacggcaccctcgtgatcgacggcgtgacccctaacatgatcgactacttcggcaggccctacgagggaatcgccgtgttcgacggaaagaagatcaccgtgaccggcaccctgtggaacggaaacaagatcatcgacgagaggctgatcaaccccgacggctccctgctgttcagggtgaccatcaatggcgtgaccggctggagactgtgcgagagaatcctggccggaggcggaggaagcctcgtgcccagaggatccggcggaggcggctccagccggctccatatgggaaactccgtggtcacatacaccaccctgatcgacggcctgtgcaaggccggcaaggtggatgaggccctggagctgttcgacgagatgaaggagaggggcatcaagcccgacgtggtcacatacaccacactgatcgacggactgtgtaaagccggcaaggtggacgaagccctcgagctgttcaaagagatgcggagcaagggcgtgaagcccaacgtggtgacatacaccaccctgatcgacggcctgtgcaaggccggcaaagtggacgaggccctggagctgttcgacgagatgaaggagaggggcatcaagcccgacgtggtcacatacaccacactgatcgacggactgtgtaaagccggcaaggtggacgaagccctcgagctgttcaaagagatgcggagcaagggcgtgaagcccaacgtggttacatacaccaccctgatcgacggcctgtgcaaggccggcaaagtggacgaggccctggagctgttcgacgagatgaaggagaggggcatcaagcccgacgtggtcacatacaccaccctgatcgacggcctgtgcaaggccggcaaggtggatgaggccctggagctgttcgacgagatgaaggagaggggcatcaagcccgacgtggttacatacaccacactgatcgacggactgtgtaaagccggcaaggtggacgaagccctcgagctgttcaaagagatgcggagcaagggcgtgaagcccaacgtggtcacatacaccacactgatcgacggactgtgtaaagccggcaaggtggacgaagccctcgagctgttcaaagagatgcggagcaagggcgtgaagcccaacgtggtgacatacaccaccctgatcgacggcctgtgcaaggccggcaaagtggacgaggccctggagctgttcgacgagatgaaggagaggggcatcaagcccgacgtggtcacatacaacaccctgatcgacggcctgtgcaagagcggcaagatcgaggaggccctgaagctgttcaaggagatggaggagaagggcatcacccccagcgtggttacatacaacaccctgatcgacggcctgtgcaagagcggcaagatcgaggaggccctgaagctgttcaaggagatggaggagaagggcatcacccccagcgtggtcacatacaacaccctgatcgacggcctgtgcaaggccggcagactggatgaggccgaggagctgctggaggagatggaggagaagggcatcaagcccgacgtggtcacatacaccaccctgatcgacggcctgtgcaaggccggcaaagtggacgaggccctggagctgttcgacgagatgaaggagaggggcatcaagcccgacgtggtcacatacaccacactgatcgacggactgtgtaaagccggcaaggtggacgaagccctcgagctgttcaaagagatgcggagcaagggcgtgaagcccaacgtggttacatacaccaccctgatcgacggcctgtgcaaggccggcaaagtggacgaggccctggagctgttcgacgagatgaaggagaggggcatcaagcccgacgtggtcacatacaccacactgatcgacggactgtgtaaagccggcaaggtggacgaagccctcgagctgttcaaagagatgcggagcaagggcgtgaagcccaacgtggtgacatacaccaccctgatcgacggcctgtgcaaggccggcaaagtggacgaggccctggagctgttcgacgagatgaaggagaggggcatcaagcccgacgtggtcacatacaacaccctgatcgacggcctgtgcaaggccggcagactggatgaggccgaggagctgctggaggagatggaggagaagggcatcaagcccgacgagctgacctacaacaccctgatcagcggcctgggcaaggccggcagagccagagacccccccgtgctcagtagcggctccggcggcagcgggggaggcgggcatcatcaccatcaccacggacgctag

SEQ ID NO: 413 - DNA, 2610 bp, Artificial Sequence
  v3.1_PPR3
atggccggagtgttcacactggaggacttcgtgggcgactggagacagaccgccggctacaacctggaccaggtgctggagcagggcggagtgagcagcctgtttcagaacctgggcgtgagcgtcacccccatccagaggatcgtgctgtccggcgagaatggcctgaagatcgacatccacgtcatcatcccctacgagggcctgagcggcgatcagatgggccagatcgagaagatcttcaaggtggtgtatcccgtcgacgaccaccacttcaaggtgatcctgcattacggcaccctcgtgatcgacggcgtgacccctaacatgatcgactacttcggcaggccctacgagggaatcgccgtgttcgacggaaagaagatcaccgtgaccggcaccctgtggaacggaaacaagatcatcgacgagaggctgatcaaccccgacggctccctgctgttcagggtgaccatcaatggcgtgaccggctggagactgtgcgagagaatcctggccggaggcggaggaagcctcgtgcccagaggatccggcggaggcggctccagccggctccatatgggaaactccgtggtcacatacaacaccctgatcgacggcctgtgcaagagcggcaagatcgaggaggccctgaagctgttcaaggagatggaggagaagggcatcacccccagcgtggtcacatacaacaccctgatcgacggcctgtgcaaggccggcagactggatgaggccgaggagctgctggaggagatggaggagaagggcatcaagcccgacgtggtgacatacaccaccctgatcgacggcctgtgcaaggccggcaaagtggacgaggccctggagctgttcgacgagatgaaggagaggggcatcaagcccgacgtggtcacatacaccacactgatcgacggactgtgtaaagccggcaaggtggacgaagccctcgagctgttcaaagagatgcggagcaagggcgtgaagcccaacgtggttacatacaccaccctgatcgacggcctgtgcaaggccggcaaagtggacgaggccctggagctgttcgacgagatgaaggagaggggcatcaagcccgacgtggtcacatacaacaccctgatcgacggcctgtgcaaggccggcagactggatgaggccgaggagctgctggaggagatggaggagaagggcatcaagcccgacgtggttacatacaacaccctgatcgacggcctgtgcaagagcggcaagatcgaggaggccctgaagctgttcaaggagatggaggagaagggcatcacccccagcgtggtcacatacaccacactgatcgacggactgtgtaaagccggcaaggtggacgaagccctcgagctgttcaaagagatgcggagcaagggcgtgaagcccaacgtggtgacatacaacaccctgatcgacggcctgtgcaaggccggcagactggatgaggccgaggagctgctggaggagatggaggagaagggcatcaagcccgacgtggtcacatacaccacactgatcgacggactgtgtaaagccggcaaggtggacgaagccctcgagctgttcaaagagatgcggagcaagggcgtgaagcccaacgtggttacatacaccacactgatcgacggactgtgtaaagccggcaaggtggacgaagccctcgagctgttcaaagagatgcggagcaagggcgtgaagcccaacgtggtcacatacaacaccctgatcgacggcctgtgcaagagcggcaagatcgaggaggccctgaagctgttcaaggagatggaggagaagggcatcacccccagcgtggtcacatacaacaccctgatcgacggcctgtgcaagagcggcaagatcgaggaggccctgaagctgttcaaggagatggaggagaagggcatcacccccagcgtggtcacatacaccacactgatcgacggactgtgtaaagccggcaaggtggacgaagccctcgagctgttcaaagagatgcggagcaagggcgtgaagcccaacgtggttacatacaccaccctgatcgacggcctgtgcaaggccggcaaagtggacgaggccctggagctgttcgacgagatgaaggagaggggcatcaagcccgacgtggtcacatacaacaccctgatcgacggcctgtgcaagagcggcaagatcgaggaggccctgaagctgttcaaggagatggaggagaagggcatcacccccagcgtggtgacatacaacaccctgatcgacggcctgtgcaagagcggcaagatcgaggaggccctgaagctgttcaaggagatggaggagaagggcatcacccccagcgtggtcacatacaacaccctgatcgacggcctgtgcaaggccggcagactggatgaggccgaggagctgctggaggagatggaggagaagggcatcaagcccgacgagctgacctacaacaccctgatcagcggcctgggcaaggccggcagagccagagacccccccgtgctcagtagcggctccggcggcagcgggggaggcgggcatcatcaccatcaccacggacgctag

SEQ ID NO: 414 - DNA, 2610 bp, Artificial Sequence
  v3.1_PPR5
atggccggagtgttcacactggaggacttcgtgggcgactggagacagaccgccggctacaacctggaccaggtgctggagcagggcggagtgagcagcctgtttcagaacctgggcgtgagcgtcacccccatccagaggatcgtgctgtccggcgagaatggcctgaagatcgacatccacgtcatcatcccctacgagggcctgagcggcgatcagatgggccagatcgagaagatcttcaaggtggtgtatcccgtcgacgaccaccacttcaaggtgatcctgcattacggcaccctcgtgatcgacggcgtgacccctaacatgatcgactacttcggcaggccctacgagggaatcgccgtgttcgacggaaagaagatcaccgtgaccggcaccctgtggaacggaaacaagatcatcgacgagaggctgatcaaccccgacggctccctgctgttcagggtgaccatcaatggcgtgaccggctggagactgtgcgagagaatcctggccggaggcggaggaagcctcgtgcccagaggatccggcggaggcggctccagccggctccatatgggaaactccgtggtcacatacaccaccctgatcgacggcctgtgcaaggccggcaaggtggatgaggccctggagctgttcgacgagatgaaggagaggggcatcaagcccgacgtggtcacatacaccaccctgatcgacggcctgtgcaaggccggcaaggtggatgaggccctggagctgttcgacgagatgaaggagaggggcatcaagcccgacgtggtgacatacaacaccctgatcgacggcctgtgcaagagcggcaagatcgaggaggccctgaagctgttcaaggagatggaggagaagggcatcacccccagcgtggtcacatacaccacactgatcgacggactgtgtaaagccggcaaggtggacgaagccctcgagctgttcaaagagatgcggagcaagggcgtgaagcccaacgtggttacatacaccacactgatcgacggactgtgtaaagccggcaaggtggacgaagccctcgagctgttcaaagagatgcggagcaagggcgtgaagcccaacgtggtcacatacaccacactgatcgacggactgtgtaaagccggcaaggtggacgaagccctcgagctgttcaaagagatgcggagcaagggcgtgaagcccaacgtggttacatacaccacactgatcgacggactgtgtaaagccggcaaggtggacgaagccctcgagctgttcaaagagatgcggagcaagggcgtgaagcccaacgtggtcacatacaccacactgatcgacggactgtgtaaagccggcaaggtggacgaagccctcgagctgttcaaagagatgcggagcaagggcgtgaagcccaacgtggtgacatacaccaccctgatcgacggcctgtgcaaggccggcaaagtggacgaggccctggagctgttcgacgagatgaaggagaggggcatcaagcccgacgtggtcacatacaccacactgatcgacggactgtgtaaagccggcaaggtggacgaagccctcgagctgttcaaagagatgcggagcaagggcgtgaagcccaacgtggttacatacaacaccctgatcgacggcctgtgcaaggccggcagactggatgaggccgaggagctgctggaggagatggaggagaagggcatcaagcccgacgtggtcacatacaacaccctgatcgacggcctgtgcaagagcggcaagatcgaggaggccctgaagctgttcaaggagatggaggagaagggcatcacccccagcgtggtcacatacaccacactgatcgacggactgtgtaaagccggcaaggtggacgaagccctcgagctgttcaaagagatgcggagcaagggcgtgaagcccaacgtggtcacatacaacaccctgatcgacggcctgtgcaagagcggcaagatcgaggaggccctgaagctgttcaaggagatggaggagaagggcatcacccccagcgtggttacatacaacaccctgatcgacggcctgtgcaaggccggcagactggatgaggccgaggagctgctggaggagatggaggagaagggcatcaagcccgacgtggtcacatacaccaccctgatcgacggcctgtgcaaggccggcaaggtggatgaggccctggagctgttcgacgagatgaaggagaggggcatcaagcccgacgtggtgacatacaacaccctgatcgacggcctgtgcaaggccggcagactggatgaggccgaggagctgctggaggagatggaggagaagggcatcaagcccgacgtggtcacatacaccacactgatcgacggactgtgtaaagccggcaaggtggacgaagccctcgagctgttcaaagagatgcggagcaagggcgtgaagcccaacgagctgacctacaacaccctgatcagcggcctgggcaaggccggcagagccagagacccccccgtgctcagtagcggctccggcggcagcgggggaggcgggcatcatcaccatcaccacggacgctag

SEQ ID NO: 415 - DNA, 2610 bp, Artificial Sequence
  v3.1_PPR6
atggccggagtgttcacactggaggacttcgtgggcgactggagacagaccgccggctacaacctggaccaggtgctggagcagggcggagtgagcagcctgtttcagaacctgggcgtgagcgtcacccccatccagaggatcgtgctgtccggcgagaatggcctgaagatcgacatccacgtcatcatcccctacgagggcctgagcggcgatcagatgggccagatcgagaagatcttcaaggtggtgtatcccgtcgacgaccaccacttcaaggtgatcctgcattacggcaccctcgtgatcgacggcgtgacccctaacatgatcgactacttcggcaggccctacgagggaatcgccgtgttcgacggaaagaagatcaccgtgaccggcaccctgtggaacggaaacaagatcatcgacgagaggctgatcaaccccgacggctccctgctgttcagggtgaccatcaatggcgtgaccggctggagactgtgcgagagaatcctggccggaggcggaggaagcctcgtgcccagaggatccggcggaggcggctccagccggctccatatgggaaactccgtggtcacatacaacaccctgatcgacggcctgtgcaagagcggcaagatcgaggaggccctgaagctgttcaaggagatggaggagaagggcatcacccccagcgtggtcacatacaccacactgatcgacggactgtgtaaagccggcaaggtggacgaagccctcgagctgttcaaagagatgcggagcaagggcgtgaagcccaacgtggtgacatacaccacactgatcgacggactgtgtaaagccggcaaggtggacgaagccctcgagctgttcaaagagatgcggagcaagggcgtgaagcccaacgtggtcacatacaacaccctgatcgacggcctgtgcaagagcggcaagatcgaggaggccctgaagctgttcaaggagatggaggagaagggcatcacccccagcgtggttacatacaccacactgatcgacggactgtgtaaagccggcaaggtggacgaagccctcgagctgttcaaagagatgcggagcaagggcgtgaagcccaacgtggtcacatacaacaccctgatcgacggcctgtgcaaggccggcagactggatgaggccgaggagctgctggaggagatggaggagaagggcatcaagcccgacgtggttacatacaacaccctgatcgacggcctgtgcaagagcggcaagatcgaggaggccctgaagctgttcaaggagatggaggagaagggcatcacccccagcgtggtcacatacaccacactgatcgacggactgtgtaaagccggcaaggtggacgaagccctcgagctgttcaaagagatgcggagcaagggcgtgaagcccaacgtggtgacatacaccaccctgatcgacggcctgtgcaaggccggcaaagtggacgaggccctggagctgttcgacgagatgaaggagaggggcatcaagcccgacgtggtcacatacaacaccctgatcgacggcctgtgcaaggccggcagactggatgaggccgaggagctgctggaggagatggaggagaagggcatcaagcccgacgtggttacatacaacaccctgatcgacggcctgtgcaagagcggcaagatcgaggaggccctgaagctgttcaaggagatggaggagaagggcatcacccccagcgtggtcacatacaacaccctgatcgacggcctgtgcaaggccggcagactggatgaggccgaggagctgctggaggagatggaggagaagggcatcaagcccgacgtggtcacatacaccaccctgatcgacggcctgtgcaaggccggcaaagtggacgaggccctggagctgttcgacgagatgaaggagaggggcatcaagcccgacgtggtcacatacaccacactgatcgacggactgtgtaaagccggcaaggtggacgaagccctcgagctgttcaaagagatgcggagcaagggcgtgaagcccaacgtggttacatacaacaccctgatcgacggcctgtgcaaggccggcagactggatgaggccgaggagctgctggaggagatggaggagaagggcatcaagcccgacgtggtcacatacaccacactgatcgacggactgtgtaaagccggcaaggtggacgaagccctcgagctgttcaaagagatgcggagcaagggcgtgaagcccaacgtggtgacatacaccacactgatcgacggactgtgtaaagccggcaaggtggacgaagccctcgagctgttcaaagagatgcggagcaagggcgtgaagcccaacgtggtcacatacaccaccctgatcgacggcctgtgcaaggccggcaaggtggatgaggccctggagctgttcgacgagatgaaggagaggggcatcaagcccgacgagctgacctacaacaccctgatcagcggcctgggcaaggccggcagagccagagacccccccgtgctcagtagcggctccggcggcagcgggggaggcgggcatcatcaccatcaccacggacgctag

SEQ ID NO: 416 - DNA, 2610 bp, Artificial Sequence
  v3.1_PPR7
atggccggagtgttcacactggaggacttcgtgggcgactggagacagaccgccggctacaacctggaccaggtgctggagcagggcggagtgagcagcctgtttcagaacctgggcgtgagcgtcacccccatccagaggatcgtgctgtccggcgagaatggcctgaagatcgacatccacgtcatcatcccctacgagggcctgagcggcgatcagatgggccagatcgagaagatcttcaaggtggtgtatcccgtcgacgaccaccacttcaaggtgatcctgcattacggcaccctcgtgatcgacggcgtgacccctaacatgatcgactacttcggcaggccctacgagggaatcgccgtgttcgacggaaagaagatcaccgtgaccggcaccctgtggaacggaaacaagatcatcgacgagaggctgatcaaccccgacggctccctgctgttcagggtgaccatcaatggcgtgaccggctggagactgtgcgagagaatcctggccggaggcggaggaagcctcgtgcccagaggatccggcggaggcggctccagccggctccatatgggaaactccgtggtcacatacaacaccctgatcgacggcctgtgcaagagcggcaagatcgaggaggccctgaagctgttcaaggagatggaggagaagggcatcacccccagcgtggtcacatacaccacactgatcgacggactgtgtaaagccggcaaggtggacgaagccctcgagctgttcaaagagatgcggagcaagggcgtgaagcccaacgtggtgacatacaacaccctgatcgacggcctgtgcaagagcggcaagatcgaggaggccctgaagctgttcaaggagatggaggagaagggcatcacccccagcgtggtcacatacaccacactgatcgacggactgtgtaaagccggcaaggtggacgaagccctcgagctgttcaaagagatgcggagcaagggcgtgaagcccaacgtggttacatacaccacactgatcgacggactgtgtaaagccggcaaggtggacgaagccctcgagctgttcaaagagatgcggagcaagggcgtgaagcccaacgtggtcacatacaacaccctgatcgacggcctgtgcaaggccggcagactggatgaggccgaggagctgctggaggagatggaggagaagggcatcaagcccgacgtggttacatacaccaccctgatcgacggcctgtgcaaggccggcaaagtggacgaggccctggagctgttcgacgagatgaaggagaggggcatcaagcccgacgtggtcacatacaacaccctgatcgacggcctgtgcaaggccggcagactggatgaggccgaggagctgctggaggagatggaggagaagggcatcaagcccgacgtggtgacatacaccaccctgatcgacggcctgtgcaaggccggcaaagtggacgaggccctggagctgttcgacgagatgaaggagaggggcatcaagcccgacgtggtcacatacaccaccctgatcgacggcctgtgcaaggccggcaaggtggatgaggccctggagctgttcgacgagatgaaggagaggggcatcaagcccgacgtggttacatacaacaccctgatcgacggcctgtgcaagagcggcaagatcgaggaggccctgaagctgttcaaggagatggaggagaagggcatcacccccagcgtggtcacatacaacaccctgatcgacggcctgtgcaagagcggcaagatcgaggaggccctgaagctgttcaaggagatggaggagaagggcatcacccccagcgtggtcacatacaccaccctgatcgacggcctgtgcaaggccggcaaagtggacgaggccctggagctgttcgacgagatgaaggagaggggcatcaagcccgacgtggtcacatacaccacactgatcgacggactgtgtaaagccggcaaggtggacgaagccctcgagctgttcaaagagatgcggagcaagggcgtgaagcccaacgtggttacatacaccaccctgatcgacggcctgtgcaaggccggcaaagtggacgaggccctggagctgttcgacgagatgaaggagaggggcatcaagcccgacgtggtcacatacaccaccctgatcgacggcctgtgcaaggccggcaaggtggatgaggccctggagctgttcgacgagatgaaggagaggggcatcaagcccgacgtggtgacatacaccacactgatcgacggactgtgtaaagccggcaaggtggacgaagccctcgagctgttcaaagagatgcggagcaagggcgtgaagcccaacgtggtcacatacaacaccctgatcgacggcctgtgcaagagcggcaagatcgaggaggccctgaagctgttcaaggagatggaggagaagggcatcacccccagcgagctgacctacaacaccctgatcagcggcctgggcaaggccggcagagccagagacccccccgtgctcagtagcggctccggcggcagcgggggaggcgggcatcatcaccatcaccacggacgctag

SEQ ID NO: 417 - DNA, 2610 bp, Artificial Sequence
  v3.1_PPR8
atggccggagtgttcacactggaggacttcgtgggcgactggagacagaccgccggctacaacctggaccaggtgctggagcagggcggagtgagcagcctgtttcagaacctgggcgtgagcgtcacccccatccagaggatcgtgctgtccggcgagaatggcctgaagatcgacatccacgtcatcatcccctacgagggcctgagcggcgatcagatgggccagatcgagaagatcttcaaggtggtgtatcccgtcgacgaccaccacttcaaggtgatcctgcattacggcaccctcgtgatcgacggcgtgacccctaacatgatcgactacttcggcaggccctacgagggaatcgccgtgttcgacggaaagaagatcaccgtgaccggcaccctgtggaacggaaacaagatcatcgacgagaggctgatcaaccccgacggctccctgctgttcagggtgaccatcaatggcgtgaccggctggagactgtgcgagagaatcctggccggaggcggaggaagcctcgtgcccagaggatccggcggaggcggctccagccggctccatatgggaaactccgtggtcacatacaccacactgatcgacggactgtgtaaagccggcaaggtggacgaagccctcgagctgttcaaagagatgcggagcaagggcgtgaagcccaacgtggtcacatacaccacactgatcgacggactgtgtaaagccggcaaggtggacgaagccctcgagctgttcaaagagatgcggagcaagggcgtgaagcccaacgtggtgacatacaccaccctgatcgacggcctgtgcaaggccggcaaagtggacgaggccctggagctgttcgacgagatgaaggagaggggcatcaagcccgacgtggtcacatacaacaccctgatcgacggcctgtgcaagagcggcaagatcgaggaggccctgaagctgttcaaggagatggaggagaagggcatcacccccagcgtggttacatacaacaccctgatcgacggcctgtgcaagagcggcaagatcgaggaggccctgaagctgttcaaggagatggaggagaagggcatcacccccagcgtggtcacatacaccacactgatcgacggactgtgtaaagccggcaaggtggacgaagccctcgagctgttcaaagagatgcggagcaagggcgtgaagcccaacgtggttacatacaccaccctgatcgacggcctgtgcaaggccggcaaagtggacgaggccctggagctgttcgacgagatgaaggagaggggcatcaagcccgacgtggtcacatacaacaccctgatcgacggcctgtgcaaggccggcagactggatgaggccgaggagctgctggaggagatggaggagaagggcatcaagcccgacgtggtgacatacaacaccctgatcgacggcctgtgcaaggccggcagactggatgaggccgaggagctgctggaggagatggaggagaagggcatcaagcccgacgtggtcacatacaacaccctgatcgacggcctgtgcaaggccggcagactggatgaggccgaggagctgctggaggagatggaggagaagggcatcaagcccgacgtggttacatacaacaccctgatcgacggcctgtgcaaggccggcagactggatgaggccgaggagctgctggaggagatggaggagaagggcatcaagcccgacgtggtcacatacaacaccctgatcgacggcctgtgcaagagcggcaagatcgaggaggccctgaagctgttcaaggagatggaggagaagggcatcacccccagcgtggtcacatacaccacactgatcgacggactgtgtaaagccggcaaggtggacgaagccctcgagctgttcaaagagatgcggagcaagggcgtgaagcccaacgtggtcacatacaacaccctgatcgacggcctgtgcaaggccggcagactggatgaggccgaggagctgctggaggagatggaggagaagggcatcaagcccgacgtggttacatacaacaccctgatcgacggcctgtgcaaggccggcagactggatgaggccgaggagctgctggaggagatggaggagaagggcatcaagcccgacgtggtcacatacaacaccctgatcgacggcctgtgcaaggccggcagactggatgaggccgaggagctgctggaggagatggaggagaagggcatcaagcccgacgtggtgacatacaacaccctgatcgacggcctgtgcaaggccggcagactggatgaggccgaggagctgctggaggagatggaggagaagggcatcaagcccgacgtggtcacatacaccaccctgatcgacggcctgtgcaaggccggcaaggtggatgaggccctggagctgttcgacgagatgaaggagaggggcatcaagcccgacgagctgacctacaacaccctgatcagcggcctgggcaaggccggcagagccagagacccccccgtgctcagtagcggctccggcggcagcgggggaggcgggcatcatcaccatcaccacggacgctag

SEQ ID NO: 418 - DNA, 2610 bp, Artificial Sequence
  v3.1_PPR9
atggccggagtgttcacactggaggacttcgtgggcgactggagacagaccgccggctacaacctggaccaggtgctggagcagggcggagtgagcagcctgtttcagaacctgggcgtgagcgtcacccccatccagaggatcgtgctgtccggcgagaatggcctgaagatcgacatccacgtcatcatcccctacgagggcctgagcggcgatcagatgggccagatcgagaagatcttcaaggtggtgtatcccgtcgacgaccaccacttcaaggtgatcctgcattacggcaccctcgtgatcgacggcgtgacccctaacatgatcgactacttcggcaggccctacgagggaatcgccgtgttcgacggaaagaagatcaccgtgaccggcaccctgtggaacggaaacaagatcatcgacgagaggctgatcaaccccgacggctccctgctgttcagggtgaccatcaatggcgtgaccggctggagactgtgcgagagaatcctggccggaggcggaggaagcctcgtgcccagaggatccggcggaggcggctccagccggctccatatgggaaactccgtggtcacatacaacaccctgatcgacggcctgtgcaagagcggcaagatcgaggaggccctgaagctgttcaaggagatggaggagaagggcatcacccccagcgtggtcacatacaccacactgatcgacggactgtgtaaagccggcaaggtggacgaagccctcgagctgttcaaagagatgcggagcaagggcgtgaagcccaacgtggtgacatacaacaccctgatcgacggcctgtgcaagagcggcaagatcgaggaggccctgaagctgttcaaggagatggaggagaagggcatcacccccagcgtggtcacatacaacaccctgatcgacggcctgtgcaaggccggcagactggatgaggccgaggagctgctggaggagatggaggagaagggcatcaagcccgacgtggttacatacaccacactgatcgacggactgtgtaaagccggcaaggtggacgaagccctcgagctgttcaaagagatgcggagcaagggcgtgaagcccaacgtggtcacatacaacaccctgatcgacggcctgtgcaaggccggcagactggatgaggccgaggagctgctggaggagatggaggagaagggcatcaagcccgacgtggttacatacaacaccctgatcgacggcctgtgcaaggccggcagactggatgaggccgaggagctgctggaggagatggaggagaagggcatcaagcccgacgtggtcacatacaacaccctgatcgacggcctgtgcaaggccggcagactggatgaggccgaggagctgctggaggagatggaggagaagggcatcaagcccgacgtggtgacatacaccacactgatcgacggactgtgtaaagccggcaaggtggacgaagccctcgagctgttcaaagagatgcggagcaagggcgtgaagcccaacgtggtcacatacaccacactgatcgacggactgtgtaaagccggcaaggtggacgaagccctcgagctgttcaaagagatgcggagcaagggcgtgaagcccaacgtggttacatacaccaccctgatcgacggcctgtgcaaggccggcaaagtggacgaggccctggagctgttcgacgagatgaaggagaggggcatcaagcccgacgtggtcacatacaacaccctgatcgacggcctgtgcaaggccggcagactggatgaggccgaggagctgctggaggagatggaggagaagggcatcaagcccgacgtggtcacatacaacaccctgatcgacggcctgtgcaaggccggcagactggatgaggccgaggagctgctggaggagatggaggagaagggcatcaagcccgacgtggtcacatacaccacactgatcgacggactgtgtaaagccggcaaggtggacgaagccctcgagctgttcaaagagatgcggagcaagggcgtgaagcccaacgtggttacatacaacaccctgatcgacggcctgtgcaaggccggcagactggatgaggccgaggagctgctggaggagatggaggagaagggcatcaagcccgacgtggtcacatacaacaccctgatcgacggcctgtgcaagagcggcaagatcgaggaggccctgaagctgttcaaggagatggaggagaagggcatcacccccagcgtggtgacatacaccacactgatcgacggactgtgtaaagccggcaaggtggacgaagccctcgagctgttcaaagagatgcggagcaagggcgtgaagcccaacgtggtcacatacaccacactgatcgacggactgtgtaaagccggcaaggtggacgaagccctcgagctgttcaaagagatgcggagcaagggcgtgaagcccaacgagctgacctacaacaccctgatcagcggcctgggcaaggccggcagagccagagacccccccgtgctcagtagcggctccggcggcagcgggggaggcgggcatcatcaccatcaccacggacgctag

SEQ ID NO: 419 - DNA, 2610 bp, Artificial Sequence
  v3.1_PPR10
atggccggagtgttcacactggaggacttcgtgggcgactggagacagaccgccggctacaacctggaccaggtgctggagcagggcggagtgagcagcctgtttcagaacctgggcgtgagcgtcacccccatccagaggatcgtgctgtccggcgagaatggcctgaagatcgacatccacgtcatcatcccctacgagggcctgagcggcgatcagatgggccagatcgagaagatcttcaaggtggtgtatcccgtcgacgaccaccacttcaaggtgatcctgcattacggcaccctcgtgatcgacggcgtgacccctaacatgatcgactacttcggcaggccctacgagggaatcgccgtgttcgacggaaagaagatcaccgtgaccggcaccctgtggaacggaaacaagatcatcgacgagaggctgatcaaccccgacggctccctgctgttcagggtgaccatcaatggcgtgaccggctggagactgtgcgagagaatcctggccggaggcggaggaagcctcgtgcccagaggatccggcggaggcggctccagccggctccatatgggaaactccgtggtcacatacaacaccctgatcgacggcctgtgcaagagcggcaagatcgaggaggccctgaagctgttcaaggagatggaggagaagggcatcacccccagcgtggtcacatacaccacactgatcgacggactgtgtaaagccggcaaggtggacgaagccctcgagctgttcaaagagatgcggagcaagggcgtgaagcccaacgtggtgacatacaccacactgatcgacggactgtgtaaagccggcaaggtggacgaagccctcgagctgttcaaagagatgcggagcaagggcgtgaagcccaacgtggtcacatacaccacactgatcgacggactgtgtaaagccggcaaggtggacgaagccctcgagctgttcaaagagatgcggagcaagggcgtgaagcccaacgtggttacatacaacaccctgatcgacggcctgtgcaagagcggcaagatcgaggaggccctgaagctgttcaaggagatggaggagaagggcatcacccccagcgtggtcacatacaacaccctgatcgacggcctgtgcaaggccggcagactggatgaggccgaggagctgctggaggagatggaggagaagggcatcaagcccgacgtggttacatacaacaccctgatcgacggcctgtgcaaggccggcagactggatgaggccgaggagctgctggaggagatggaggagaagggcatcaagcccgacgtggtcacatacaacaccctgatcgacggcctgtgcaaggccggcagactggatgaggccgaggagctgctggaggagatggaggagaagggcatcaagcccgacgtggtgacatacaacaccctgatcgacggcctgtgcaagagcggcaagatcgaggaggccctgaagctgttcaaggagatggaggagaagggcatcacccccagcgtggtcacatacaccacactgatcgacggactgtgtaaagccggcaaggtggacgaagccctcgagctgttcaaagagatgcggagcaagggcgtgaagcccaacgtggttacatacaacaccctgatcgacggcctgtgcaagagcggcaagatcgaggaggccctgaagctgttcaaggagatggaggagaagggcatcacccccagcgtggtcacatacaacaccctgatcgacggcctgtgcaaggccggcagactggatgaggccgaggagctgctggaggagatggaggagaagggcatcaagcccgacgtggtcacatacaacaccctgatcgacggcctgtgcaaggccggcagactggatgaggccgaggagctgctggaggagatggaggagaagggcatcaagcccgacgtggtcacatacaacaccctgatcgacggcctgtgcaaggccggcagactggatgaggccgaggagctgctggaggagatggaggagaagggcatcaagcccgacgtggttacatacaccaccctgatcgacggcctgtgcaaggccggcaaagtggacgaggccctggagctgttcgacgagatgaaggagaggggcatcaagcccgacgtggtcacatacaccacactgatcgacggactgtgtaaagccggcaaggtggacgaagccctcgagctgttcaaagagatgcggagcaagggcgtgaagcccaacgtggtgacatacaccacactgatcgacggactgtgtaaagccggcaaggtggacgaagccctcgagctgttcaaagagatgcggagcaagggcgtgaagcccaacgtggtcacatacaccacactgatcgacggactgtgtaaagccggcaaggtggacgaagccctcgagctgttcaaagagatgcggagcaagggcgtgaagcccaacgagctgacctacaacaccctgatcagcggcctgggcaaggccggcagagccagagacccccccgtgctcagtagcggctccggcggcagcgggggaggcgggcatcatcaccatcaccacggacgctag

SEQ ID NO: 420 - DNA, 2610 bp, Artificial Sequence
  v3.1_PPR11
atggccggagtgttcacactggaggacttcgtgggcgactggagacagaccgccggctacaacctggaccaggtgctggagcagggcggagtgagcagcctgtttcagaacctgggcgtgagcgtcacccccatccagaggatcgtgctgtccggcgagaatggcctgaagatcgacatccacgtcatcatcccctacgagggcctgagcggcgatcagatgggccagatcgagaagatcttcaaggtggtgtatcccgtcgacgaccaccacttcaaggtgatcctgcattacggcaccctcgtgatcgacggcgtgacccctaacatgatcgactacttcggcaggccctacgagggaatcgccgtgttcgacggaaagaagatcaccgtgaccggcaccctgtggaacggaaacaagatcatcgacgagaggctgatcaaccccgacggctccctgctgttcagggtgaccatcaatggcgtgaccggctggagactgtgcgagagaatcctggccggaggcggaggaagcctcgtgcccagaggatccggcggaggcggctccagccggctccatatgggaaactccgtggtcacatacaccaccctgatcgacggcctgtgcaaggccggcaaggtggatgaggccctggagctgttcgacgagatgaaggagaggggcatcaagcccgacgtggtcacatacaccaccctgatcgacggcctgtgcaaggccggcaaggtggatgaggccctggagctgttcgacgagatgaaggagaggggcatcaagcccgacgtggtgacatacaacaccctgatcgacggcctgtgcaaggccggcagactggatgaggccgaggagctgctggaggagatggaggagaagggcatcaagcccgacgtggtcacatacaccaccctgatcgacggcctgtgcaaggccggcaaggtggatgaggccctggagctgttcgacgagatgaaggagaggggcatcaagcccgacgtggttacatacaccaccctgatcgacggcctgtgcaaggccggcaaagtggacgaggccctggagctgttcgacgagatgaaggagaggggcatcaagcccgacgtggtcacatacaacaccctgatcgacggcctgtgcaaggccggcagactggatgaggccgaggagctgctggaggagatggaggagaagggcatcaagcccgacgtggttacatacaccaccctgatcgacggcctgtgcaaggccggcaaagtggacgaggccctggagctgttcgacgagatgaaggagaggggcatcaagcccgacgtggtcacatacaccacactgatcgacggactgtgtaaagccggcaaggtggacgaagccctcgagctgttcaaagagatgcggagcaagggcgtgaagcccaacgtggtgacatacaccaccctgatcgacggcctgtgcaaggccggcaaagtggacgaggccctggagctgttcgacgagatgaaggagaggggcatcaagcccgacgtggtcacatacaccaccctgatcgacggcctgtgcaaggccggcaaggtggatgaggccctggagctgttcgacgagatgaaggagaggggcatcaagcccgacgtggttacatacaacaccctgatcgacggcctgtgcaagagcggcaagatcgaggaggccctgaagctgttcaaggagatggaggagaagggcatcacccccagcgtggtcacatacaacaccctgatcgacggcctgtgcaagagcggcaagatcgaggaggccctgaagctgttcaaggagatggaggagaagggcatcacccccagcgtggtcacatacaacaccctgatcgacggcctgtgcaagagcggcaagatcgaggaggccctgaagctgttcaaggagatggaggagaagggcatcacccccagcgtggtcacatacaacaccctgatcgacggcctgtgcaaggccggcagactggatgaggccgaggagctgctggaggagatggaggagaagggcatcaagcccgacgtggttacatacaccaccctgatcgacggcctgtgcaaggccggcaaagtggacgaggccctggagctgttcgacgagatgaaggagaggggcatcaagcccgacgtggtcacatacaccaccctgatcgacggcctgtgcaaggccggcaaggtggatgaggccctggagctgttcgacgagatgaaggagaggggcatcaagcccgacgtggtgacatacaccaccctgatcgacggcctgtgcaaggccggcaaagtggacgaggccctggagctgttcgacgagatgaaggagaggggcatcaagcccgacgtggtcacatacaacaccctgatcgacggcctgtgcaagagcggcaagatcgaggaggccctgaagctgttcaaggagatggaggagaagggcatcacccccagcgagctgacctacaacaccctgatcagcggcctgggcaaggccggcagagccagagacccccccgtgctcagtagcggctccggcggcagcgggggaggcgggcatcatcaccatcaccacggacgctag

SEQ ID NO: 421 - DNA, 2610 bp, Artificial Sequence
  v3.1_PPR12
atggccggagtgttcacactggaggacttcgtgggcgactggagacagaccgccggctacaacctggaccaggtgctggagcagggcggagtgagcagcctgtttcagaacctgggcgtgagcgtcacccccatccagaggatcgtgctgtccggcgagaatggcctgaagatcgacatccacgtcatcatcccctacgagggcctgagcggcgatcagatgggccagatcgagaagatcttcaaggtggtgtatcccgtcgacgaccaccacttcaaggtgatcctgcattacggcaccctcgtgatcgacggcgtgacccctaacatgatcgactacttcggcaggccctacgagggaatcgccgtgttcgacggaaagaagatcaccgtgaccggcaccctgtggaacggaaacaagatcatcgacgagaggctgatcaaccccgacggctccctgctgttcagggtgaccatcaatggcgtgaccggctggagactgtgcgagagaatcctggccggaggcggaggaagcctcgtgcccagaggatccggcggaggcggctccagccggctccatatgggaaactccgtggtcacatacaccaccctgatcgacggcctgtgcaaggccggcaaggtggatgaggccctggagctgttcgacgagatgaaggagaggggcatcaagcccgacgtggtcacatacaccacactgatcgacggactgtgtaaagccggcaaggtggacgaagccctcgagctgttcaaagagatgcggagcaagggcgtgaagcccaacgtggtgacatacaacaccctgatcgacggcctgtgcaagagcggcaagatcgaggaggccctgaagctgttcaaggagatggaggagaagggcatcacccccagcgtggtcacatacaacaccctgatcgacggcctgtgcaaggccggcagactggatgaggccgaggagctgctggaggagatggaggagaagggcatcaagcccgacgtggttacatacaacaccctgatcgacggcctgtgcaagagcggcaagatcgaggaggccctgaagctgttcaaggagatggaggagaagggcatcacccccagcgtggtcacatacaccacactgatcgacggactgtgtaaagccggcaaggtggacgaagccctcgagctgttcaaagagatgcggagcaagggcgtgaagcccaacgtggttacatacaccaccctgatcgacggcctgtgcaaggccggcaaagtggacgaggccctggagctgttcgacgagatgaaggagaggggcatcaagcccgacgtggtcacatacaccaccctgatcgacggcctgtgcaaggccggcaaggtggatgaggccctggagctgttcgacgagatgaaggagaggggcatcaagcccgacgtggtgacatacaccacactgatcgacggactgtgtaaagccggcaaggtggacgaagccctcgagctgttcaaagagatgcggagcaagggcgtgaagcccaacgtggtcacatacaccacactgatcgacggactgtgtaaagccggcaaggtggacgaagccctcgagctgttcaaagagatgcggagcaagggcgtgaagcccaacgtggttacatacaacaccctgatcgacggcctgtgcaaggccggcagactggatgaggccgaggagctgctggaggagatggaggagaagggcatcaagcccgacgtggtcacatacaacaccctgatcgacggcctgtgcaagagcggcaagatcgaggaggccctgaagctgttcaaggagatggaggagaagggcatcacccccagcgtggtcacatacaccaccctgatcgacggcctgtgcaaggccggcaaagtggacgaggccctggagctgttcgacgagatgaaggagaggggcatcaagcccgacgtggtcacatacaccaccctgatcgacggcctgtgcaaggccggcaaggtggatgaggccctggagctgttcgacgagatgaaggagaggggcatcaagcccgacgtggttacatacaacaccctgatcgacggcctgtgcaagagcggcaagatcgaggaggccctgaagctgttcaaggagatggaggagaagggcatcacccccagcgtggtcacatacaacaccctgatcgacggcctgtgcaaggccggcagactggatgaggccgaggagctgctggaggagatggaggagaagggcatcaagcccgacgtggtgacatacaacaccctgatcgacggcctgtgcaagagcggcaagatcgaggaggccctgaagctgttcaaggagatggaggagaagggcatcacccccagcgtggtcacatacaacaccctgatcgacggcctgtgcaaggccggcagactggatgaggccgaggagctgctggaggagatggaggagaagggcatcaagcccgacgagctgacctacaacaccctgatcagcggcctgggcaaggccggcagagccagagacccccccgtgctcagtagcggctccggcggcagcgggggaggcgggcatcatcaccatcaccacggacgctag

SEQ ID NO: 422 - DNA, 2610 bp, Artificial Sequence
  v3.1_PPR13
atggccggagtgttcacactggaggacttcgtgggcgactggagacagaccgccggctacaacctggaccaggtgctggagcagggcggagtgagcagcctgtttcagaacctgggcgtgagcgtcacccccatccagaggatcgtgctgtccggcgagaatggcctgaagatcgacatccacgtcatcatcccctacgagggcctgagcggcgatcagatgggccagatcgagaagatcttcaaggtggtgtatcccgtcgacgaccaccacttcaaggtgatcctgcattacggcaccctcgtgatcgacggcgtgacccctaacatgatcgactacttcggcaggccctacgagggaatcgccgtgttcgacggaaagaagatcaccgtgaccggcaccctgtggaacggaaacaagatcatcgacgagaggctgatcaaccccgacggctccctgctgttcagggtgaccatcaatggcgtgaccggctggagactgtgcgagagaatcctggccggaggcggaggaagcctcgtgcccagaggatccggcggaggcggctccagccggctccatatgggaaactccgtggtcacatacaacaccctgatcgacggcctgtgcaagagcggcaagatcgaggaggccctgaagctgttcaaggagatggaggagaagggcatcacccccagcgtggtcacatacaccacactgatcgacggactgtgtaaagccggcaaggtggacgaagccctcgagctgttcaaagagatgcggagcaagggcgtgaagcccaacgtggtgacatacaccacactgatcgacggactgtgtaaagccggcaaggtggacgaagccctcgagctgttcaaagagatgcggagcaagggcgtgaagcccaacgtggtcacatacaacaccctgatcgacggcctgtgcaagagcggcaagatcgaggaggccctgaagctgttcaaggagatggaggagaagggcatcacccccagcgtggttacatacaccacactgatcgacggactgtgtaaagccggcaaggtggacgaagccctcgagctgttcaaagagatgcggagcaagggcgtgaagcccaacgtggtcacatacaacaccctgatcgacggcctgtgcaaggccggcagactggatgaggccgaggagctgctggaggagatggaggagaagggcatcaagcccgacgtggttacatacaacaccctgatcgacggcctgtgcaagagcggcaagatcgaggaggccctgaagctgttcaaggagatggaggagaagggcatcacccccagcgtggtcacatacaccacactgatcgacggactgtgtaaagccggcaaggtggacgaagccctcgagctgttcaaagagatgcggagcaagggcgtgaagcccaacgtggtgacatacaccacactgatcgacggactgtgtaaagccggcaaggtggacgaagccctcgagctgttcaaagagatgcggagcaagggcgtgaagcccaacgtggtcacatacaccacactgatcgacggactgtgtaaagccggcaaggtggacgaagccctcgagctgttcaaagagatgcggagcaagggcgtgaagcccaacgtggttacatacaccaccctgatcgacggcctgtgcaaggccggcaaagtggacgaggccctggagctgttcgacgagatgaaggagaggggcatcaagcccgacgtggtcacatacaccacactgatcgacggactgtgtaaagccggcaaggtggacgaagccctcgagctgttcaaagagatgcggagcaagggcgtgaagcccaacgtggtcacatacaacaccctgatcgacggcctgtgcaagagcggcaagatcgaggaggccctgaagctgttcaaggagatggaggagaagggcatcacccccagcgtggtcacatacaccacactgatcgacggactgtgtaaagccggcaaggtggacgaagccctcgagctgttcaaagagatgcggagcaagggcgtgaagcccaacgtggttacatacaacaccctgatcgacggcctgtgcaagagcggcaagatcgaggaggccctgaagctgttcaaggagatggaggagaagggcatcacccccagcgtggtcacatacaacaccctgatcgacggcctgtgcaagagcggcaagatcgaggaggccctgaagctgttcaaggagatggaggagaagggcatcacccccagcgtggtgacatacaccacactgatcgacggactgtgtaaagccggcaaggtggacgaagccctcgagctgttcaaagagatgcggagcaagggcgtgaagcccaacgtggtcacatacaacaccctgatcgacggcctgtgcaaggccggcagactggatgaggccgaggagctgctggaggagatggaggagaagggcatcaagcccgacgagctgacctacaacaccctgatcagcggcctgggcaaggccggcagagccagagacccccccgtgctcagtagcggctccggcggcagcgggggaggcgggcatcatcaccatcaccacggacgctag

SEQ ID NO: 423 - DNA, 2610 bp, Artificial Sequence
  v3.1_PPR14
atggccggagtgttcacactggaggacttcgtgggcgactggagacagaccgccggctacaacctggaccaggtgctggagcagggcggagtgagcagcctgtttcagaacctgggcgtgagcgtcacccccatccagaggatcgtgctgtccggcgagaatggcctgaagatcgacatccacgtcatcatcccctacgagggcctgagcggcgatcagatgggccagatcgagaagatcttcaaggtggtgtatcccgtcgacgaccaccacttcaaggtgatcctgcattacggcaccctcgtgatcgacggcgtgacccctaacatgatcgactacttcggcaggccctacgagggaatcgccgtgttcgacggaaagaagatcaccgtgaccggcaccctgtggaacggaaacaagatcatcgacgagaggctgatcaaccccgacggctccctgctgttcagggtgaccatcaatggcgtgaccggctggagactgtgcgagagaatcctggccggaggcggaggaagcctcgtgcccagaggatccggcggaggcggctccagccggctccatatgggaaactccgtggtcacatacaccaccctgatcgacggcctgtgcaaggccggcaaggtggatgaggccctggagctgttcgacgagatgaaggagaggggcatcaagcccgacgtggtcacatacaacaccctgatcgacggcctgtgcaaggccggcagactggatgaggccgaggagctgctggaggagatggaggagaagggcatcaagcccgacgtggtgacatacaacaccctgatcgacggcctgtgcaagagcggcaagatcgaggaggccctgaagctgttcaaggagatggaggagaagggcatcacccccagcgtggtcacatacaccacactgatcgacggactgtgtaaagccggcaaggtggacgaagccctcgagctgttcaaagagatgcggagcaagggcgtgaagcccaacgtggttacatacaccaccctgatcgacggcctgtgcaaggccggcaaagtggacgaggccctggagctgttcgacgagatgaaggagaggggcatcaagcccgacgtggtcacatacaccacactgatcgacggactgtgtaaagccggcaaggtggacgaagccctcgagctgttcaaagagatgcggagcaagggcgtgaagcccaacgtggttacatacaccaccctgatcgacggcctgtgcaaggccggcaaagtggacgaggccctggagctgttcgacgagatgaaggagaggggcatcaagcccgacgtggtcacatacaccaccctgatcgacggcctgtgcaaggccggcaaggtggatgaggccctggagctgttcgacgagatgaaggagaggggcatcaagcccgacgtggtgacatacaccaccctgatcgacggcctgtgcaaggccggcaaagtggacgaggccctggagctgttcgacgagatgaaggagaggggcatcaagcccgacgtggtcacatacaacaccctgatcgacggcctgtgcaaggccggcagactggatgaggccgaggagctgctggaggagatggaggagaagggcatcaagcccgacgtggttacatacaacaccctgatcgacggcctgtgcaaggccggcagactggatgaggccgaggagctgctggaggagatggaggagaagggcatcaagcccgacgtggtcacatacaacaccctgatcgacggcctgtgcaagagcggcaagatcgaggaggccctgaagctgttcaaggagatggaggagaagggcatcacccccagcgtggtcacatacaacaccctgatcgacggcctgtgcaaggccggcagactggatgaggccgaggagctgctggaggagatggaggagaagggcatcaagcccgacgtggtcacatacaccaccctgatcgacggcctgtgcaaggccggcaaggtggatgaggccctggagctgttcgacgagatgaaggagaggggcatcaagcccgacgtggttacatacaccaccctgatcgacggcctgtgcaaggccggcaaagtggacgaggccctggagctgttcgacgagatgaaggagaggggcatcaagcccgacgtggtcacatacaccacactgatcgacggactgtgtaaagccggcaaggtggacgaagccctcgagctgttcaaagagatgcggagcaagggcgtgaagcccaacgtggtgacatacaacaccctgatcgacggcctgtgcaaggccggcagactggatgaggccgaggagctgctggaggagatggaggagaagggcatcaagcccgacgtggtcacatacaacaccctgatcgacggcctgtgcaaggccggcagactggatgaggccgaggagctgctggaggagatggaggagaagggcatcaagcccgacgagctgacctacaacaccctgatcagcggcctgggcaaggccggcagagccagagacccccccgtgctcagtagcggctccggcggcagcgggggaggcgggcatcatcaccatcaccacggacgctag

SEQ ID NO: 424 - DNA, 2610 bp, Artificial Sequence
  v3.1_PPR15
atggccggagtgttcacactggaggacttcgtgggcgactggagacagaccgccggctacaacctggaccaggtgctggagcagggcggagtgagcagcctgtttcagaacctgggcgtgagcgtcacccccatccagaggatcgtgctgtccggcgagaatggcctgaagatcgacatccacgtcatcatcccctacgagggcctgagcggcgatcagatgggccagatcgagaagatcttcaaggtggtgtatcccgtcgacgaccaccacttcaaggtgatcctgcattacggcaccctcgtgatcgacggcgtgacccctaacatgatcgactacttcggcaggccctacgagggaatcgccgtgttcgacggaaagaagatcaccgtgaccggcaccctgtggaacggaaacaagatcatcgacgagaggctgatcaaccccgacggctccctgctgttcagggtgaccatcaatggcgtgaccggctggagactgtgcgagagaatcctggccggaggcggaggaagcctcgtgcccagaggatccggcggaggcggctccagccggctccatatgggaaactccgtggtcacatacaccaccctgatcgacggcctgtgcaaggccggcaaggtggatgaggccctggagctgttcgacgagatgaaggagaggggcatcaagcccgacgtggtcacatacaacaccctgatcgacggcctgtgcaagagcggcaagatcgaggaggccctgaagctgttcaaggagatggaggagaagggcatcacccccagcgtggtgacatacaccacactgatcgacggactgtgtaaagccggcaaggtggacgaagccctcgagctgttcaaagagatgcggagcaagggcgtgaagcccaacgtggtcacatacaccaccctgatcgacggcctgtgcaaggccggcaaggtggatgaggccctggagctgttcgacgagatgaaggagaggggcatcaagcccgacgtggttacatacaccacactgatcgacggactgtgtaaagccggcaaggtggacgaagccctcgagctgttcaaagagatgcggagcaagggcgtgaagcccaacgtggtcacatacaacaccctgatcgacggcctgtgcaaggccggcagactggatgaggccgaggagctgctggaggagatggaggagaagggcatcaagcccgacgtggttacatacaccacactgatcgacggactgtgtaaagccggcaaggtggacgaagccctcgagctgttcaaagagatgcggagcaagggcgtgaagcccaacgtggtcacatacaccacactgatcgacggactgtgtaaagccggcaaggtggacgaagccctcgagctgttcaaagagatgcggagcaagggcgtgaagcccaacgtggtgacatacaacaccctgatcgacggcctgtgcaaggccggcagactggatgaggccgaggagctgctggaggagatggaggagaagggcatcaagcccgacgtggtcacatacaacaccctgatcgacggcctgtgcaaggccggcagactggatgaggccgaggagctgctggaggagatggaggagaagggcatcaagcccgacgtggttacatacaccacactgatcgacggactgtgtaaagccggcaaggtggacgaagccctcgagctgttcaaagagatgcggagcaagggcgtgaagcccaacgtggtcacatacaccacactgatcgacggactgtgtaaagccggcaaggtggacgaagccctcgagctgttcaaagagatgcggagcaagggcgtgaagcccaacgtggtcacatacaacaccctgatcgacggcctgtgcaaggccggcagactggatgaggccgaggagctgctggaggagatggaggagaagggcatcaagcccgacgtggtcacatacaccacactgatcgacggactgtgtaaagccggcaaggtggacgaagccctcgagctgttcaaagagatgcggagcaagggcgtgaagcccaacgtggttacatacaccacactgatcgacggactgtgtaaagccggcaaggtggacgaagccctcgagctgttcaaagagatgcggagcaagggcgtgaagcccaacgtggtcacatacaccaccctgatcgacggcctgtgcaaggccggcaaggtggatgaggccctggagctgttcgacgagatgaaggagaggggcatcaagcccgacgtggtgacatacaccacactgatcgacggactgtgtaaagccggcaaggtggacgaagccctcgagctgttcaaagagatgcggagcaagggcgtgaagcccaacgtggtcacatacaccacactgatcgacggactgtgtaaagccggcaaggtggacgaagccctcgagctgttcaaagagatgcggagcaagggcgtgaagcccaacgagctgacctacaacaccctgatcagcggcctgggcaaggccggcagagccagagacccccccgtgctcagtagcggctccggcggcagcgggggaggcgggcatcatcaccatcaccacggacgctag

SEQ ID NO: 425 - DNA, 2610 bp, Artificial Sequence
  v3.1_PPR16
atggccggagtgttcacactggaggacttcgtgggcgactggagacagaccgccggctacaacctggaccaggtgctggagcagggcggagtgagcagcctgtttcagaacctgggcgtgagcgtcacccccatccagaggatcgtgctgtccggcgagaatggcctgaagatcgacatccacgtcatcatcccctacgagggcctgagcggcgatcagatgggccagatcgagaagatcttcaaggtggtgtatcccgtcgacgaccaccacttcaaggtgatcctgcattacggcaccctcgtgatcgacggcgtgacccctaacatgatcgactacttcggcaggccctacgagggaatcgccgtgttcgacggaaagaagatcaccgtgaccggcaccctgtggaacggaaacaagatcatcgacgagaggctgatcaaccccgacggctccctgctgttcagggtgaccatcaatggcgtgaccggctggagactgtgcgagagaatcctggccggaggcggaggaagcctcgtgcccagaggatccggcggaggcggctccagccggctccatatgggaaactccgtggtcacatacaccacactgatcgacggactgtgtaaagccggcaaggtggacgaagccctcgagctgttcaaagagatgcggagcaagggcgtgaagcccaacgtggtcacatacaccacactgatcgacggactgtgtaaagccggcaaggtggacgaagccctcgagctgttcaaagagatgcggagcaagggcgtgaagcccaacgtggtgacatacaccaccctgatcgacggcctgtgcaaggccggcaaagtggacgaggccctggagctgttcgacgagatgaaggagaggggcatcaagcccgacgtggtcacatacaccaccctgatcgacggcctgtgcaaggccggcaaggtggatgaggccctggagctgttcgacgagatgaaggagaggggcatcaagcccgacgtggttacatacaccacactgatcgacggactgtgtaaagccggcaaggtggacgaagccctcgagctgttcaaagagatgcggagcaagggcgtgaagcccaacgtggtcacatacaacaccctgatcgacggcctgtgcaaggccggcagactggatgaggccgaggagctgctggaggagatggaggagaagggcatcaagcccgacgtggttacatacaccacactgatcgacggactgtgtaaagccggcaaggtggacgaagccctcgagctgttcaaagagatgcggagcaagggcgtgaagcccaacgtggtcacatacaccacactgatcgacggactgtgtaaagccggcaaggtggacgaagccctcgagctgttcaaagagatgcggagcaagggcgtgaagcccaacgtggtgacatacaacaccctgatcgacggcctgtgcaaggccggcagactggatgaggccgaggagctgctggaggagatggaggagaagggcatcaagcccgacgtggtcacatacaccacactgatcgacggactgtgtaaagccggcaaggtggacgaagccctcgagctgttcaaagagatgcggagcaagggcgtgaagcccaacgtggttacatacaacaccctgatcgacggcctgtgcaaggccggcagactggatgaggccgaggagctgctggaggagatggaggagaagggcatcaagcccgacgtggtcacatacaacaccctgatcgacggcctgtgcaagagcggcaagatcgaggaggccctgaagctgttcaaggagatggaggagaagggcatcacccccagcgtggtcacatacaccacactgatcgacggactgtgtaaagccggcaaggtggacgaagccctcgagctgttcaaagagatgcggagcaagggcgtgaagcccaacgtggtcacatacaccacactgatcgacggactgtgtaaagccggcaaggtggacgaagccctcgagctgttcaaagagatgcggagcaagggcgtgaagcccaacgtggttacatacaccacactgatcgacggactgtgtaaagccggcaaggtggacgaagccctcgagctgttcaaagagatgcggagcaagggcgtgaagcccaacgtggtcacatacaacaccctgatcgacggcctgtgcaagagcggcaagatcgaggaggccctgaagctgttcaaggagatggaggagaagggcatcacccccagcgtggtgacatacaccacactgatcgacggactgtgtaaagccggcaaggtggacgaagccctcgagctgttcaaagagatgcggagcaagggcgtgaagcccaacgtggtcacatacaacaccctgatcgacggcctgtgcaagagcggcaagatcgaggaggccctgaagctgttcaaggagatggaggagaagggcatcacccccagcgagctgacctacaacaccctgatcagcggcctgggcaaggccggcagagccagagacccccccgtgctcagtagcggctccggcggcagcgggggaggcgggcatcatcaccatcaccacggacgctag

SEQ ID NO: 426 - DNA, 2610 bp, Artificial Sequence
  v3.1_PPR17
atggccggagtgttcacactggaggacttcgtgggcgactggagacagaccgccggctacaacctggaccaggtgctggagcagggcggagtgagcagcctgtttcagaacctgggcgtgagcgtcacccccatccagaggatcgtgctgtccggcgagaatggcctgaagatcgacatccacgtcatcatcccctacgagggcctgagcggcgatcagatgggccagatcgagaagatcttcaaggtggtgtatcccgtcgacgaccaccacttcaaggtgatcctgcattacggcaccctcgtgatcgacggcgtgacccctaacatgatcgactacttcggcaggccctacgagggaatcgccgtgttcgacggaaagaagatcaccgtgaccggcaccctgtggaacggaaacaagatcatcgacgagaggctgatcaaccccgacggctccctgctgttcagggtgaccatcaatggcgtgaccggctggagactgtgcgagagaatcctggccggaggcggaggaagcctcgtgcccagaggatccggcggaggcggctccagccggctccatatgggaaactccgtggtcacatacaacaccctgatcgacggcctgtgcaaggccggcagactggatgaggccgaggagctgctggaggagatggaggagaagggcatcaagcccgacgtggtcacatacaacaccctgatcgacggcctgtgcaaggccggcagactggatgaggccgaggagctgctggaggagatggaggagaagggcatcaagcccgacgtggtgacatacaccacactgatcgacggactgtgtaaagccggcaaggtggacgaagccctcgagctgttcaaagagatgcggagcaagggcgtgaagcccaacgtggtcacatacaacaccctgatcgacggcctgtgcaaggccggcagactggatgaggccgaggagctgctggaggagatggaggagaagggcatcaagcccgacgtggttacatacaacaccctgatcgacggcctgtgcaagagcggcaagatcgaggaggccctgaagctgttcaaggagatggaggagaagggcatcacccccagcgtggtcacatacaccacactgatcgacggactgtgtaaagccggcaaggtggacgaagccctcgagctgttcaaagagatgcggagcaagggcgtgaagcccaacgtggttacatacaccaccctgatcgacggcctgtgcaaggccggcaaagtggacgaggccctggagctgttcgacgagatgaaggagaggggcatcaagcccgacgtggtcacatacaccacactgatcgacggactgtgtaaagccggcaaggtggacgaagccctcgagctgttcaaagagatgcggagcaagggcgtgaagcccaacgtggtgacatacaacaccctgatcgacggcctgtgcaagagcggcaagatcgaggaggccctgaagctgttcaaggagatggaggagaagggcatcacccccagcgtggtcacatacaacaccctgatcgacggcctgtgcaaggccggcagactggatgaggccgaggagctgctggaggagatggaggagaagggcatcaagcccgacgtggttacatacaccaccctgatcgacggcctgtgcaaggccggcaaagtggacgaggccctggagctgttcgacgagatgaaggagaggggcatcaagcccgacgtggtcacatacaccacactgatcgacggactgtgtaaagccggcaaggtggacgaagccctcgagctgttcaaagagatgcggagcaagggcgtgaagcccaacgtggtcacatacaacaccctgatcgacggcctgtgcaaggccggcagactggatgaggccgaggagctgctggaggagatggaggagaagggcatcaagcccgacgtggtcacatacaccaccctgatcgacggcctgtgcaaggccggcaaggtggatgaggccctggagctgttcgacgagatgaaggagaggggcatcaagcccgacgtggttacatacaacaccctgatcgacggcctgtgcaaggccggcagactggatgaggccgaggagctgctggaggagatggaggagaagggcatcaagcccgacgtggtcacatacaacaccctgatcgacggcctgtgcaaggccggcagactggatgaggccgaggagctgctggaggagatggaggagaagggcatcaagcccgacgtggtgacatacaccaccctgatcgacggcctgtgcaaggccggcaaagtggacgaggccctggagctgttcgacgagatgaaggagaggggcatcaagcccgacgtggtcacatacaccacactgatcgacggactgtgtaaagccggcaaggtggacgaagccctcgagctgttcaaagagatgcggagcaagggcgtgaagcccaacgagctgacctacaacaccctgatcagcggcctgggcaaggccggcagagccagagacccccccgtgctcagtagcggctccggcggcagcgggggaggcgggcatcatcaccatcaccacggacgctag

SEQ ID NO: 427 - DNA, 2610 bp, Artificial Sequence
  v3.1_PPR18
atggccggagtgttcacactggaggacttcgtgggcgactggagacagaccgccggctacaacctggaccaggtgctggagcagggcggagtgagcagcctgtttcagaacctgggcgtgagcgtcacccccatccagaggatcgtgctgtccggcgagaatggcctgaagatcgacatccacgtcatcatcccctacgagggcctgagcggcgatcagatgggccagatcgagaagatcttcaaggtggtgtatcccgtcgacgaccaccacttcaaggtgatcctgcattacggcaccctcgtgatcgacggcgtgacccctaacatgatcgactacttcggcaggccctacgagggaatcgccgtgttcgacggaaagaagatcaccgtgaccggcaccctgtggaacggaaacaagatcatcgacgagaggctgatcaaccccgacggctccctgctgttcagggtgaccatcaatggcgtgaccggctggagactgtgcgagagaatcctggccggaggcggaggaagcctcgtgcccagaggatccggcggaggcggctccagccggctccatatgggaaactccgtggtcacatacaccaccctgatcgacggcctgtgcaaggccggcaaggtggatgaggccctggagctgttcgacgagatgaaggagaggggcatcaagcccgacgtggtcacatacaccaccctgatcgacggcctgtgcaaggccggcaaggtggatgaggccctggagctgttcgacgagatgaaggagaggggcatcaagcccgacgtggtgacatacaacaccctgatcgacggcctgtgcaaggccggcagactggatgaggccgaggagctgctggaggagatggaggagaagggcatcaagcccgacgtggtcacatacaacaccctgatcgacggcctgtgcaaggccggcagactggatgaggccgaggagctgctggaggagatggaggagaagggcatcaagcccgacgtggttacatacaccacactgatcgacggactgtgtaaagccggcaaggtggacgaagccctcgagctgttcaaagagatgcggagcaagggcgtgaagcccaacgtggtcacatacaccaccctgatcgacggcctgtgcaaggccggcaaggtggatgaggccctggagctgttcgacgagatgaaggagaggggcatcaagcccgacgtggttacatacaccacactgatcgacggactgtgtaaagccggcaaggtggacgaagccctcgagctgttcaaagagatgcggagcaagggcgtgaagcccaacgtggtcacatacaccaccctgatcgacggcctgtgcaaggccggcaaggtggatgaggccctggagctgttcgacgagatgaaggagaggggcatcaagcccgacgtggtgacatacaccacactgatcgacggactgtgtaaagccggcaaggtggacgaagccctcgagctgttcaaagagatgcggagcaagggcgtgaagcccaacgtggtcacatacaacaccctgatcgacggcctgtgcaaggccggcagactggatgaggccgaggagctgctggaggagatggaggagaagggcatcaagcccgacgtggttacatacaccacactgatcgacggactgtgtaaagccggcaaggtggacgaagccctcgagctgttcaaagagatgcggagcaagggcgtgaagcccaacgtggtcacatacaacaccctgatcgacggcctgtgcaagagcggcaagatcgaggaggccctgaagctgttcaaggagatggaggagaagggcatcacccccagcgtggtcacatacaccacactgatcgacggactgtgtaaagccggcaaggtggacgaagccctcgagctgttcaaagagatgcggagcaagggcgtgaagcccaacgtggtcacatacaccaccctgatcgacggcctgtgcaaggccggcaaggtggatgaggccctggagctgttcgacgagatgaaggagaggggcatcaagcccgacgtggttacatacaacaccctgatcgacggcctgtgcaaggccggcagactggatgaggccgaggagctgctggaggagatggaggagaagggcatcaagcccgacgtggtcacatacaccaccctgatcgacggcctgtgcaaggccggcaaggtggatgaggccctggagctgttcgacgagatgaaggagaggggcatcaagcccgacgtggtgacatacaacaccctgatcgacggcctgtgcaaggccggcagactggatgaggccgaggagctgctggaggagatggaggagaagggcatcaagcccgacgtggtcacatacaccaccctgatcgacggcctgtgcaaggccggcaaggtggatgaggccctggagctgttcgacgagatgaaggagaggggcatcaagcccgacgagctgacctacaacaccctgatcagcggcctgggcaaggccggcagagccagagacccccccgtgctcagtagcggctccggcggcagcgggggaggcgggcatcatcaccatcaccacggacgctag

SEQ ID NO: 428 - DNA, 2610 bp, Artificial Sequence
  v3.1_PPR19
atggccggagtgttcacactggaggacttcgtgggcgactggagacagaccgccggctacaacctggaccaggtgctggagcagggcggagtgagcagcctgtttcagaacctgggcgtgagcgtcacccccatccagaggatcgtgctgtccggcgagaatggcctgaagatcgacatccacgtcatcatcccctacgagggcctgagcggcgatcagatgggccagatcgagaagatcttcaaggtggtgtatcccgtcgacgaccaccacttcaaggtgatcctgcattacggcaccctcgtgatcgacggcgtgacccctaacatgatcgactacttcggcaggccctacgagggaatcgccgtgttcgacggaaagaagatcaccgtgaccggcaccctgtggaacggaaacaagatcatcgacgagaggctgatcaaccccgacggctccctgctgttcagggtgaccatcaatggcgtgaccggctggagactgtgcgagagaatcctggccggaggcggaggaagcctcgtgcccagaggatccggcggaggcggctccagccggctccatatgggaaactccgtggtcacatacaccaccctgatcgacggcctgtgcaaggccggcaaggtggatgaggccctggagctgttcgacgagatgaaggagaggggcatcaagcccgacgtggtcacatacaacaccctgatcgacggcctgtgcaaggccggcagactggatgaggccgaggagctgctggaggagatggaggagaagggcatcaagcccgacgtggtgacatacaccaccctgatcgacggcctgtgcaaggccggcaaagtggacgaggccctggagctgttcgacgagatgaaggagaggggcatcaagcccgacgtggtcacatacaccaccctgatcgacggcctgtgcaaggccggcaaggtggatgaggccctggagctgttcgacgagatgaaggagaggggcatcaagcccgacgtggttacatacaccaccctgatcgacggcctgtgcaaggccggcaaagtggacgaggccctggagctgttcgacgagatgaaggagaggggcatcaagcccgacgtggtcacatacaccaccctgatcgacggcctgtgcaaggccggcaaggtggatgaggccctggagctgttcgacgagatgaaggagaggggcatcaagcccgacgtggttacatacaccaccctgatcgacggcctgtgcaaggccggcaaagtggacgaggccctggagctgttcgacgagatgaaggagaggggcatcaagcccgacgtggtcacatacaacaccctgatcgacggcctgtgcaaggccggcagactggatgaggccgaggagctgctggaggagatggaggagaagggcatcaagcccgacgtggtgacatacaccaccctgatcgacggcctgtgcaaggccggcaaagtggacgaggccctggagctgttcgacgagatgaaggagaggggcatcaagcccgacgtggtcacatacaccaccctgatcgacggcctgtgcaaggccggcaaggtggatgaggccctggagctgttcgacgagatgaaggagaggggcatcaagcccgacgtggttacatacaacaccctgatcgacggcctgtgcaaggccggcagactggatgaggccgaggagctgctggaggagatggaggagaagggcatcaagcccgacgtggtcacatacaccacactgatcgacggactgtgtaaagccggcaaggtggacgaagccctcgagctgttcaaagagatgcggagcaagggcgtgaagcccaacgtggtcacatacaccaccctgatcgacggcctgtgcaaggccggcaaagtggacgaggccctggagctgttcgacgagatgaaggagaggggcatcaagcccgacgtggtcacatacaccaccctgatcgacggcctgtgcaaggccggcaaggtggatgaggccctggagctgttcgacgagatgaaggagaggggcatcaagcccgacgtggttacatacaccacactgatcgacggactgtgtaaagccggcaaggtggacgaagccctcgagctgttcaaagagatgcggagcaagggcgtgaagcccaacgtggtcacatacaccacactgatcgacggactgtgtaaagccggcaaggtggacgaagccctcgagctgttcaaagagatgcggagcaagggcgtgaagcccaacgtggtgacatacaccacactgatcgacggactgtgtaaagccggcaaggtggacgaagccctcgagctgttcaaagagatgcggagcaagggcgtgaagcccaacgtggtcacatacaacaccctgatcgacggcctgtgcaaggccggcagactggatgaggccgaggagctgctggaggagatggaggagaagggcatcaagcccgacgagctgacctacaacaccctgatcagcggcctgggcaaggccggcagagccagagacccccccgtgctcagtagcggctccggcggcagcgggggaggcgggcatcatcaccatcaccacggacgctag

SEQ ID NO: 429 - DNA, 2610 bp, Artificial Sequence
  v3.1_PPR20
atggccggagtgttcacactggaggacttcgtgggcgactggagacagaccgccggctacaacctggaccaggtgctggagcagggcggagtgagcagcctgtttcagaacctgggcgtgagcgtcacccccatccagaggatcgtgctgtccggcgagaatggcctgaagatcgacatccacgtcatcatcccctacgagggcctgagcggcgatcagatgggccagatcgagaagatcttcaaggtggtgtatcccgtcgacgaccaccacttcaaggtgatcctgcattacggcaccctcgtgatcgacggcgtgacccctaacatgatcgactacttcggcaggccctacgagggaatcgccgtgttcgacggaaagaagatcaccgtgaccggcaccctgtggaacggaaacaagatcatcgacgagaggctgatcaaccccgacggctccctgctgttcagggtgaccatcaatggcgtgaccggctggagactgtgcgagagaatcctggccggaggcggaggaagcctcgtgcccagaggatccggcggaggcggctccagccggctccatatgggaaactccgtggtcacatacaccaccctgatcgacggcctgtgcaaggccggcaaggtggatgaggccctggagctgttcgacgagatgaaggagaggggcatcaagcccgacgtggtcacatacaacaccctgatcgacggcctgtgcaaggccggcagactggatgaggccgaggagctgctggaggagatggaggagaagggcatcaagcccgacgtggtgacatacaccaccctgatcgacggcctgtgcaaggccggcaaagtggacgaggccctggagctgttcgacgagatgaaggagaggggcatcaagcccgacgtggtcacatacaccacactgatcgacggactgtgtaaagccggcaaggtggacgaagccctcgagctgttcaaagagatgcggagcaagggcgtgaagcccaacgtggttacatacaacaccctgatcgacggcctgtgcaaggccggcagactggatgaggccgaggagctgctggaggagatggaggagaagggcatcaagcccgacgtggtcacatacaccaccctgatcgacggcctgtgcaaggccggcaaggtggatgaggccctggagctgttcgacgagatgaaggagaggggcatcaagcccgacgtggttacatacaacaccctgatcgacggcctgtgcaaggccggcagactggatgaggccgaggagctgctggaggagatggaggagaagggcatcaagcccgacgtggtcacatacaccaccctgatcgacggcctgtgcaaggccggcaaggtggatgaggccctggagctgttcgacgagatgaaggagaggggcatcaagcccgacgtggtgacatacaccaccctgatcgacggcctgtgcaaggccggcaaagtggacgaggccctggagctgttcgacgagatgaaggagaggggcatcaagcccgacgtggtcacatacaccacactgatcgacggactgtgtaaagccggcaaggtggacgaagccctcgagctgttcaaagagatgcggagcaagggcgtgaagcccaacgtggttacatacaccaccctgatcgacggcctgtgcaaggccggcaaagtggacgaggccctggagctgttcgacgagatgaaggagaggggcatcaagcccgacgtggtcacatacaacaccctgatcgacggcctgtgcaaggccggcagactggatgaggccgaggagctgctggaggagatggaggagaagggcatcaagcccgacgtggtcacatacaacaccctgatcgacggcctgtgcaaggccggcagactggatgaggccgaggagctgctggaggagatggaggagaagggcatcaagcccgacgtggtcacatacaccacactgatcgacggactgtgtaaagccggcaaggtggacgaagccctcgagctgttcaaagagatgcggagcaagggcgtgaagcccaacgtggttacatacaccacactgatcgacggactgtgtaaagccggcaaggtggacgaagccctcgagctgttcaaagagatgcggagcaagggcgtgaagcccaacgtggtcacatacaccaccctgatcgacggcctgtgcaaggccggcaaggtggatgaggccctggagctgttcgacgagatgaaggagaggggcatcaagcccgacgtggtgacatacaccaccctgatcgacggcctgtgcaaggccggcaaagtggacgaggccctggagctgttcgacgagatgaaggagaggggcatcaagcccgacgtggtcacatacaacaccctgatcgacggcctgtgcaagagcggcaagatcgaggaggccctgaagctgttcaaggagatggaggagaagggcatcacccccagcgagctgacctacaacaccctgatcagcggcctgggcaaggccggcagagccagagacccccccgtgctcagtagcggctccggcggcagcgggggaggcgggcatcatcaccatcaccacggacgctag

SEQ ID NO: 430 - DNA, 2610 bp, Artificial Sequence
  v3.1_PPR21
atggccggagtgttcacactggaggacttcgtgggcgactggagacagaccgccggctacaacctggaccaggtgctggagcagggcggagtgagcagcctgtttcagaacctgggcgtgagcgtcacccccatccagaggatcgtgctgtccggcgagaatggcctgaagatcgacatccacgtcatcatcccctacgagggcctgagcggcgatcagatgggccagatcgagaagatcttcaaggtggtgtatcccgtcgacgaccaccacttcaaggtgatcctgcattacggcaccctcgtgatcgacggcgtgacccctaacatgatcgactacttcggcaggccctacgagggaatcgccgtgttcgacggaaagaagatcaccgtgaccggcaccctgtggaacggaaacaagatcatcgacgagaggctgatcaaccccgacggctccctgctgttcagggtgaccatcaatggcgtgaccggctggagactgtgcgagagaatcctggccggaggcggaggaagcctcgtgcccagaggatccggcggaggcggctccagccggctccatatgggaaactccgtggtcacatacaccaccctgatcgacggcctgtgcaaggccggcaaggtggatgaggccctggagctgttcgacgagatgaaggagaggggcatcaagcccgacgtggtcacatacaccaccctgatcgacggcctgtgcaaggccggcaaggtggatgaggccctggagctgttcgacgagatgaaggagaggggcatcaagcccgacgtggtgacatacaccacactgatcgacggactgtgtaaagccggcaaggtggacgaagccctcgagctgttcaaagagatgcggagcaagggcgtgaagcccaacgtggtcacatacaccacactgatcgacggactgtgtaaagccggcaaggtggacgaagccctcgagctgttcaaagagatgcggagcaagggcgtgaagcccaacgtggttacatacaccaccctgatcgacggcctgtgcaaggccggcaaagtggacgaggccctggagctgttcgacgagatgaaggagaggggcatcaagcccgacgtggtcacatacaccacactgatcgacggactgtgtaaagccggcaaggtggacgaagccctcgagctgttcaaagagatgcggagcaagggcgtgaagcccaacgtggttacatacaccaccctgatcgacggcctgtgcaaggccggcaaagtggacgaggccctggagctgttcgacgagatgaaggagaggggcatcaagcccgacgtggtcacatacaacaccctgatcgacggcctgtgcaaggccggcagactggatgaggccgaggagctgctggaggagatggaggagaagggcatcaagcccgacgtggtgacatacaccaccctgatcgacggcctgtgcaaggccggcaaagtggacgaggccctggagctgttcgacgagatgaaggagaggggcatcaagcccgacgtggtcacatacaacaccctgatcgacggcctgtgcaaggccggcagactggatgaggccgaggagctgctggaggagatggaggagaagggcatcaagcccgacgtggttacatacaacaccctgatcgacggcctgtgcaagagcggcaagatcgaggaggccctgaagctgttcaaggagatggaggagaagggcatcacccccagcgtggtcacatacaacaccctgatcgacggcctgtgcaaggccggcagactggatgaggccgaggagctgctggaggagatggaggagaagggcatcaagcccgacgtggtcacatacaccaccctgatcgacggcctgtgcaaggccggcaaagtggacgaggccctggagctgttcgacgagatgaaggagaggggcatcaagcccgacgtggtcacatacaccaccctgatcgacggcctgtgcaaggccggcaaggtggatgaggccctggagctgttcgacgagatgaaggagaggggcatcaagcccgacgtggttacatacaccacactgatcgacggactgtgtaaagccggcaaggtggacgaagccctcgagctgttcaaagagatgcggagcaagggcgtgaagcccaacgtggtcacatacaccaccctgatcgacggcctgtgcaaggccggcaaggtggatgaggccctggagctgttcgacgagatgaaggagaggggcatcaagcccgacgtggtgacatacaacaccctgatcgacggcctgtgcaagagcggcaagatcgaggaggccctgaagctgttcaaggagatggaggagaagggcatcacccccagcgtggtcacatacaccacactgatcgacggactgtgtaaagccggcaaggtggacgaagccctcgagctgttcaaagagatgcggagcaagggcgtgaagcccaacgagctgacctacaacaccctgatcagcggcctgggcaaggccggcagagccagagacccccccgtgctcagtagcggctccggcggcagcgggggaggcgggcatcatcaccatcaccacggacgctag

SEQ ID NO: 431 - DNA, 2610 bp, Artificial Sequence
  v3.1_PPR22
atggccggagtgttcacactggaggacttcgtgggcgactggagacagaccgccggctacaacctggaccaggtgctggagcagggcggagtgagcagcctgtttcagaacctgggcgtgagcgtcacccccatccagaggatcgtgctgtccggcgagaatggcctgaagatcgacatccacgtcatcatcccctacgagggcctgagcggcgatcagatgggccagatcgagaagatcttcaaggtggtgtatcccgtcgacgaccaccacttcaaggtgatcctgcattacggcaccctcgtgatcgacggcgtgacccctaacatgatcgactacttcggcaggccctacgagggaatcgccgtgttcgacggaaagaagatcaccgtgaccggcaccctgtggaacggaaacaagatcatcgacgagaggctgatcaaccccgacggctccctgctgttcagggtgaccatcaatggcgtgaccggctggagactgtgcgagagaatcctggccggaggcggaggaagcctcgtgcccagaggatccggcggaggcggctccagccggctccatatgggaaactccgtggtcacatacaacaccctgatcgacggcctgtgcaaggccggcagactggatgaggccgaggagctgctggaggagatggaggagaagggcatcaagcccgacgtggtcacatacaccaccctgatcgacggcctgtgcaaggccggcaaggtggatgaggccctggagctgttcgacgagatgaaggagaggggcatcaagcccgacgtggtgacatacaccacactgatcgacggactgtgtaaagccggcaaggtggacgaagccctcgagctgttcaaagagatgcggagcaagggcgtgaagcccaacgtggtcacatacaacaccctgatcgacggcctgtgcaaggccggcagactggatgaggccgaggagctgctggaggagatggaggagaagggcatcaagcccgacgtggttacatacaccaccctgatcgacggcctgtgcaaggccggcaaagtggacgaggccctggagctgttcgacgagatgaaggagaggggcatcaagcccgacgtggtcacatacaccacactgatcgacggactgtgtaaagccggcaaggtggacgaagccctcgagctgttcaaagagatgcggagcaagggcgtgaagcccaacgtggttacatacaacaccctgatcgacggcctgtgcaaggccggcagactggatgaggccgaggagctgctggaggagatggaggagaagggcatcaagcccgacgtggtcacatacaccaccctgatcgacggcctgtgcaaggccggcaaggtggatgaggccctggagctgttcgacgagatgaaggagaggggcatcaagcccgacgtggtgacatacaccacactgatcgacggactgtgtaaagccggcaaggtggacgaagccctcgagctgttcaaagagatgcggagcaagggcgtgaagcccaacgtggtcacatacaacaccctgatcgacggcctgtgcaaggccggcagactggatgaggccgaggagctgctggaggagatggaggagaagggcatcaagcccgacgtggttacatacaccaccctgatcgacggcctgtgcaaggccggcaaagtggacgaggccctggagctgttcgacgagatgaaggagaggggcatcaagcccgacgtggtcacatacaccacactgatcgacggactgtgtaaagccggcaaggtggacgaagccctcgagctgttcaaagagatgcggagcaagggcgtgaagcccaacgtggtcacatacaacaccctgatcgacggcctgtgcaaggccggcagactggatgaggccgaggagctgctggaggagatggaggagaagggcatcaagcccgacgtggtcacatacaccaccctgatcgacggcctgtgcaaggccggcaaggtggatgaggccctggagctgttcgacgagatgaaggagaggggcatcaagcccgacgtggttacatacaccacactgatcgacggactgtgtaaagccggcaaggtggacgaagccctcgagctgttcaaagagatgcggagcaagggcgtgaagcccaacgtggtcacatacaacaccctgatcgacggcctgtgcaaggccggcagactggatgaggccgaggagctgctggaggagatggaggagaagggcatcaagcccgacgtggtgacatacaccaccctgatcgacggcctgtgcaaggccggcaaagtggacgaggccctggagctgttcgacgagatgaaggagaggggcatcaagcccgacgtggtcacatacaccacactgatcgacggactgtgtaaagccggcaaggtggacgaagccctcgagctgttcaaagagatgcggagcaagggcgtgaagcccaacgagctgacctacaacaccctgatcagcggcctgggcaaggccggcagagccagagacccccccgtgctcagtagcggctccggcggcagcgggggaggcgggcatcatcaccatcaccacggacgctag

SEQ ID NO: 432 - DNA, 2610 bp, Artificial Sequence
  v3.1_PPR23
atggccggagtgttcacactggaggacttcgtgggcgactggagacagaccgccggctacaacctggaccaggtgctggagcagggcggagtgagcagcctgtttcagaacctgggcgtgagcgtcacccccatccagaggatcgtgctgtccggcgagaatggcctgaagatcgacatccacgtcatcatcccctacgagggcctgagcggcgatcagatgggccagatcgagaagatcttcaaggtggtgtatcccgtcgacgaccaccacttcaaggtgatcctgcattacggcaccctcgtgatcgacggcgtgacccctaacatgatcgactacttcggcaggccctacgagggaatcgccgtgttcgacggaaagaagatcaccgtgaccggcaccctgtggaacggaaacaagatcatcgacgagaggctgatcaaccccgacggctccctgctgttcagggtgaccatcaatggcgtgaccggctggagactgtgcgagagaatcctggccggaggcggaggaagcctcgtgcccagaggatccggcggaggcggctccagccggctccatatgggaaactccgtggtcacatacaacaccctgatcgacggcctgtgcaaggccggcagactggatgaggccgaggagctgctggaggagatggaggagaagggcatcaagcccgacgtggtcacatacaacaccctgatcgacggcctgtgcaagagcggcaagatcgaggaggccctgaagctgttcaaggagatggaggagaagggcatcacccccagcgtggtgacatacaacaccctgatcgacggcctgtgcaaggccggcagactggatgaggccgaggagctgctggaggagatggaggagaagggcatcaagcccgacgtggtcacatacaacaccctgatcgacggcctgtgcaaggccggcagactggatgaggccgaggagctgctggaggagatggaggagaagggcatcaagcccgacgtggttacatacaacaccctgatcgacggcctgtgcaaggccggcagactggatgaggccgaggagctgctggaggagatggaggagaagggcatcaagcccgacgtggtcacatacaccaccctgatcgacggcctgtgcaaggccggcaaggtggatgaggccctggagctgttcgacgagatgaaggagaggggcatcaagcccgacgtggttacatacaacaccctgatcgacggcctgtgcaagagcggcaagatcgaggaggccctgaagctgttcaaggagatggaggagaagggcatcacccccagcgtggtcacatacaacaccctgatcgacggcctgtgcaagagcggcaagatcgaggaggccctgaagctgttcaaggagatggaggagaagggcatcacccccagcgtggtgacatacaccacactgatcgacggactgtgtaaagccggcaaggtggacgaagccctcgagctgttcaaagagatgcggagcaagggcgtgaagcccaacgtggtcacatacaacaccctgatcgacggcctgtgcaaggccggcagactggatgaggccgaggagctgctggaggagatggaggagaagggcatcaagcccgacgtggttacatacaacaccctgatcgacggcctgtgcaaggccggcagactggatgaggccgaggagctgctggaggagatggaggagaagggcatcaagcccgacgtggtcacatacaacaccctgatcgacggcctgtgcaaggccggcagactggatgaggccgaggagctgctggaggagatggaggagaagggcatcaagcccgacgtggtcacatacaacaccctgatcgacggcctgtgcaagagcggcaagatcgaggaggccctgaagctgttcaaggagatggaggagaagggcatcacccccagcgtggtcacatacaacaccctgatcgacggcctgtgcaagagcggcaagatcgaggaggccctgaagctgttcaaggagatggaggagaagggcatcacccccagcgtggttacatacaacaccctgatcgacggcctgtgcaagagcggcaagatcgaggaggccctgaagctgttcaaggagatggaggagaagggcatcacccccagcgtggtcacatacaccacactgatcgacggactgtgtaaagccggcaaggtggacgaagccctcgagctgttcaaagagatgcggagcaagggcgtgaagcccaacgtggtgacatacaacaccctgatcgacggcctgtgcaaggccggcagactggatgaggccgaggagctgctggaggagatggaggagaagggcatcaagcccgacgtggtcacatacaccacactgatcgacggactgtgtaaagccggcaaggtggacgaagccctcgagctgttcaaagagatgcggagcaagggcgtgaagcccaacgagctgacctacaacaccctgatcagcggcctgggcaaggccggcagagccagagacccccccgtgctcagtagcggctccggcggcagcgggggaggcgggcatcatcaccatcaccacggacgctag

SEQ ID NO: 433 - DNA, 2610 bp, Artificial Sequence
  v3.1_PPR24
atggccggagtgttcacactggaggacttcgtgggcgactggagacagaccgccggctacaacctggaccaggtgctggagcagggcggagtgagcagcctgtttcagaacctgggcgtgagcgtcacccccatccagaggatcgtgctgtccggcgagaatggcctgaagatcgacatccacgtcatcatcccctacgagggcctgagcggcgatcagatgggccagatcgagaagatcttcaaggtggtgtatcccgtcgacgaccaccacttcaaggtgatcctgcattacggcaccctcgtgatcgacggcgtgacccctaacatgatcgactacttcggcaggccctacgagggaatcgccgtgttcgacggaaagaagatcaccgtgaccggcaccctgtggaacggaaacaagatcatcgacgagaggctgatcaaccccgacggctccctgctgttcagggtgaccatcaatggcgtgaccggctggagactgtgcgagagaatcctggccggaggcggaggaagcctcgtgcccagaggatccggcggaggcggctccagccggctccatatgggaaactccgtggtcacatacaacaccctgatcgacggcctgtgcaagagcggcaagatcgaggaggccctgaagctgttcaaggagatggaggagaagggcatcacccccagcgtggtcacatacaacaccctgatcgacggcctgtgcaagagcggcaagatcgaggaggccctgaagctgttcaaggagatggaggagaagggcatcacccccagcgtggtgacatacaacaccctgatcgacggcctgtgcaagagcggcaagatcgaggaggccctgaagctgttcaaggagatggaggagaagggcatcacccccagcgtggtcacatacaccacactgatcgacggactgtgtaaagccggcaaggtggacgaagccctcgagctgttcaaagagatgcggagcaagggcgtgaagcccaacgtggttacatacaacaccctgatcgacggcctgtgcaaggccggcagactggatgaggccgaggagctgctggaggagatggaggagaagggcatcaagcccgacgtggtcacatacaccacactgatcgacggactgtgtaaagccggcaaggtggacgaagccctcgagctgttcaaagagatgcggagcaagggcgtgaagcccaacgtggttacatacaccaccctgatcgacggcctgtgcaaggccggcaaagtggacgaggccctggagctgttcgacgagatgaaggagaggggcatcaagcccgacgtggtcacatacaccacactgatcgacggactgtgtaaagccggcaaggtggacgaagccctcgagctgttcaaagagatgcggagcaagggcgtgaagcccaacgtggtgacatacaacaccctgatcgacggcctgtgcaaggccggcagactggatgaggccgaggagctgctggaggagatggaggagaagggcatcaagcccgacgtggtcacatacaccaccctgatcgacggcctgtgcaaggccggcaaggtggatgaggccctggagctgttcgacgagatgaaggagaggggcatcaagcccgacgtggttacatacaacaccctgatcgacggcctgtgcaaggccggcagactggatgaggccgaggagctgctggaggagatggaggagaagggcatcaagcccgacgtggtcacatacaccaccctgatcgacggcctgtgcaaggccggcaaggtggatgaggccctggagctgttcgacgagatgaaggagaggggcatcaagcccgacgtggtcacatacaccacactgatcgacggactgtgtaaagccggcaaggtggacgaagccctcgagctgttcaaagagatgcggagcaagggcgtgaagcccaacgtggtcacatacaacaccctgatcgacggcctgtgcaagagcggcaagatcgaggaggccctgaagctgttcaaggagatggaggagaagggcatcacccccagcgtggttacatacaccacactgatcgacggactgtgtaaagccggcaaggtggacgaagccctcgagctgttcaaagagatgcggagcaagggcgtgaagcccaacgtggtcacatacaccacactgatcgacggactgtgtaaagccggcaaggtggacgaagccctcgagctgttcaaagagatgcggagcaagggcgtgaagcccaacgtggtgacatacaccaccctgatcgacggcctgtgcaaggccggcaaagtggacgaggccctggagctgttcgacgagatgaaggagaggggcatcaagcccgacgtggtcacatacaacaccctgatcgacggcctgtgcaagagcggcaagatcgaggaggccctgaagctgttcaaggagatggaggagaagggcatcacccccagcgagctgacctacaacaccctgatcagcggcctgggcaaggccggcagagccagagacccccccgtgctcagtagcggctccggcggcagcgggggaggcgggcatcatcaccatcaccacggacgctag

SEQ ID NO: 434 - protein, 869 aa, Artificial Sequence
  v3.1_PPR1
MAGVFTLEDFVGDWRQTAGYNLDQVLEQGGVSSLFQNLGVSVTPIQRIVLSGENGLKIDIHVIIPYEGLSGDQMGQIEKIFKVVYPVDDHHFKVILHYGTLVIDGVTPNMIDYFGRPYEGIAVFDGKKITVTGTLWNGNKIIDERLINPDGSLLFRVTINGVTGWRLCERILAGGGGSLVPRGSGGGGSSRLHMGNSVVTYTTLIDGLCKAGKVDEALELFDEMKERGIKPDVVTYTTLIDGLCKAGKVDEALELFKEMRSKGVKPNVVTYTTLIDGLCKAGKVDEALELFKEMRSKGVKPNVVTYNTLIDGLCKAGRLDEAEELLEEMEEKGIKPDVVTYTTLIDGLCKAGKVDEALELFDEMKERGIKPDVVTYTTLIDGLCKAGKVDEALELFKEMRSKGVKPNVVTYTTLIDGLCKAGKVDEALELFKEMRSKGVKPNVVTYNTLIDGLCKSGKIEEALKLFKEMEEKGITPSVVTYNTLIDGLCKAGRLDEAEELLEEMEEKGIKPDVVTYNTLIDGLCKSGKIEEALKLFKEMEEKGITPSVVTYNTLIDGLCKAGRLDEAEELLEEMEEKGIKPDVVTYNTLIDGLCKAGRLDEAEELLEEMEEKGIKPDVVTYNTLIDGLCKSGKIEEALKLFKEMEEKGITPSVVTYNTLIDGLCKSGKIEEALKLFKEMEEKGITPSVVTYTTLIDGLCKAGKVDEALELFDEMKERGIKPDVVTYTTLIDGLCKAGKVDEALELFDEMKERGIKPDVVTYTTLIDGLCKAGKVDEALELFDEMKERGIKPDVVTYTTLIDGLCKAGKVDEALELFKEMRSKGVKPNELTYNTLISGLGKAGRARDPPVLSSGSGGSGGGGHHHHHHGR

SEQ ID NO: 435 - protein, 869 aa, Artificial Sequence
  v3.1_PPR2
MAGVFTLEDFVGDWRQTAGYNLDQVLEQGGVSSLFQNLGVSVTPIQRIVLSGENGLKIDIHVIIPYEGLSGDQMGQIEKIFKVVYPVDDHHFKVILHYGTLVIDGVTPNMIDYFGRPYEGIAVFDGKKITVTGTLWNGNKIIDERLINPDGSLLFRVTINGVTGWRLCERILAGGGGSLVPRGSGGGGSSRLHMGNSVVTYTTLIDGLCKAGKVDEALELFDEMKERGIKPDVVTYTTLIDGLCKAGKVDEALELFKEMRSKGVKPNVVTYTTLIDGLCKAGKVDEALELFDEMKERGIKPDVVTYTTLIDGLCKAGKVDEALELFKEMRSKGVKPNVVTYTTLIDGLCKAGKVDEALELFDEMKERGIKPDVVTYTTLIDGLCKAGKVDEALELFDEMKERGIKPDVVTYTTLIDGLCKAGKVDEALELFKEMRSKGVKPNVVTYTTLIDGLCKAGKVDEALELFKEMRSKGVKPNVVTYTTLIDGLCKAGKVDEALELFDEMKERGIKPDVVTYNTLIDGLCKSGKIEEALKLFKEMEEKGITPSVVTYNTLIDGLCKSGKIEEALKLFKEMEEKGITPSVVTYNTLIDGLCKAGRLDEAEELLEEMEEKGIKPDVVTYTTLIDGLCKAGKVDEALELFDEMKERGIKPDVVTYTTLIDGLCKAGKVDEALELFKEMRSKGVKPNVVTYTTLIDGLCKAGKVDEALELFDEMKERGIKPDVVTYTTLIDGLCKAGKVDEALELFKEMRSKGVKPNVVTYTTLIDGLCKAGKVDEALELFDEMKERGIKPDVVTYNTLIDGLCKAGRLDEAEELLEEMEEKGIKPDELTYNTLISGLGKAGRARDPPVLSSGSGGSGGGGHHHHHHGR

SEQ ID NO: 436 - protein, 869 aa, Artificial Sequence
  v3.1_PPR3
MAGVFTLEDFVGDWRQTAGYNLDQVLEQGGVSSLFQNLGVSVTPIQRIVLSGENGLKIDIHVIIPYEGLSGDQMGQIEKIFKVVYPVDDHHFKVILHYGTLVIDGVTPNMIDYFGRPYEGIAVFDGKKITVTGTLWNGNKIIDERLINPDGSLLFRVTINGVTGWRLCERILAGGGGSLVPRGSGGGGSSRLHMGNSVVTYNTLIDGLCKSGKIEEALKLFKEMEEKGITPSVVTYNTLIDGLCKAGRLDEAEELLEEMEEKGIKPDVVTYTTLIDGLCKAGKVDEALELFDEMKERGIKPDVVTYTTLIDGLCKAGKVDEALELFKEMRSKGVKPNVVTYTTLIDGLCKAGKVDEALELFDEMKERGIKPDVVTYNTLIDGLCKAGRLDEAEELLEEMEEKGIKPDVVTYNTLIDGLCKSGKIEEALKLFKEMEEKGITPSVVTYTTLIDGLCKAGKVDEALELFKEMRSKGVKPNVVTYNTLIDGLCKAGRLDEAEELLEEMEEKGIKPDVVTYTTLIDGLCKAGKVDEALELFKEMRSKGVKPNVVTYTTLIDGLCKAGKVDEALELFKEMRSKGVKPNVVTYNTLIDGLCKSGKIEEALKLFKEMEEKGITPSVVTYNTLIDGLCKSGKIEEALKLFKEMEEKGITPSVVTYTTLIDGLCKAGKVDEALELFKEMRSKGVKPNVVTYTTLIDGLCKAGKVDEALELFDEMKERGIKPDVVTYNTLIDGLCKSGKIEEALKLFKEMEEKGITPSVVTYNTLIDGLCKSGKIEEALKLFKEMEEKGITPSVVTYNTLIDGLCKAGRLDEAEELLEEMEEKGIKPDELTYNTLISGLGKAGRARDPPVLSSGSGGSGGGGHHHHHHGR

SEQ ID NO: 437 - protein, 869 aa, Artificial Sequence
  v3.1_PPR5
MAGVFTLEDFVGDWRQTAGYNLDQVLEQGGVSSLFQNLGVSVTPIQRIVLSGENGLKIDIHVIIPYEGLSGDQMGQIEKIFKVVYPVDDHHFKVILHYGTLVIDGVTPNMIDYFGRPYEGIAVFDGKKITVTGTLWNGNKIIDERLINPDGSLLFRVTINGVTGWRLCERILAGGGGSLVPRGSGGGGSSRLHMGNSVVTYTTLIDGLCKAGKVDEALELFDEMKERGIKPDVVTYTTLIDGLCKAGKVDEALELFDEMKERGIKPDVVTYNTLIDGLCKSGKIEEALKLFKEMEEKGITPSVVTYTTLIDGLCKAGKVDEALELFKEMRSKGVKPNVVTYTTLIDGLCKAGKVDEALELFKEMRSKGVKPNVVTYTTLIDGLCKAGKVDEALELFKEMRSKGVKPNVVTYTTLIDGLCKAGKVDEALELFKEMRSKGVKPNVVTYTTLIDGLCKAGKVDEALELFKEMRSKGVKPNVVTYTTLIDGLCKAGKVDEALELFDEMKERGIKPDVVTYTTLIDGLCKAGKVDEALELFKEMRSKGVKPNVVTYNTLIDGLCKAGRLDEAEELLEEMEEKGIKPDVVTYNTLIDGLCKSGKIEEALKLFKEMEEKGITPSVVTYTTLIDGLCKAGKVDEALELFKEMRSKGVKPNVVTYNTLIDGLCKSGKIEEALKLFKEMEEKGITPSVVTYNTLIDGLCKAGRLDEAEELLEEMEEKGIKPDVVTYTTLIDGLCKAGKVDEALELFDEMKERGIKPDVVTYNTLIDGLCKAGRLDEAEELLEEMEEKGIKPDVVTYTTLIDGLCKAGKVDEALELFKEMRSKGVKPNELTYNTLISGLGKAGRARDPPVLSSGSGGSGGGGHHHHHHGR

SEQ ID NO: 438 - protein, 869 aa, Artificial Sequence
  v3.1_PPR6
MAGVFTLEDFVGDWRQTAGYNLDQVLEQGGVSSLFQNLGVSVTPIQRIVLSGENGLKIDIHVIIPYEGLSGDQMGQIEKIFKVVYPVDDHHFKVILHYGTLVIDGVTPNMIDYFGRPYEGIAVFDGKKITVTGTLWNGNKIIDERLINPDGSLLFRVTINGVTGWRLCERILAGGGGSLVPRGSGGGGSSRLHMGNSVVTYNTLIDGLCKSGKIEEALKLFKEMEEKGITPSVVTYTTLIDGLCKAGKVDEALELFKEMRSKGVKPNVVTYTTLIDGLCKAGKVDEALELFKEMRSKGVKPNVVTYNTLIDGLCKSGKIEEALKLFKEMEEKGITPSVVTYTTLIDGLCKAGKVDEALELFKEMRSKGVKPNVVTYNTLIDGLCKAGRLDEAEELLEEMEEKGIKPDVVTYNTLIDGLCKSGKIEEALKLFKEMEEKGITPSVVTYTTLIDGLCKAGKVDEALELFKEMRSKGVKPNVVTYTTLIDGLCKAGKVDEALELFDEMKERGIKPDVVTYNTLIDGLCKAGRLDEAEELLEEMEEKGIKPDVVTYNTLIDGLCKSGKIEEALKLFKEMEEKGITPSVVTYNTLIDGLCKAGRLDEAEELLEEMEEKGIKPDVVTYTTLIDGLCKAGKVDEALELFDEMKERGIKPDVVTYTTLIDGLCKAGKVDEALELFKEMRSKGVKPNVVTYNTLIDGLCKAGRLDEAEELLEEMEEKGIKPDVVTYTTLIDGLCKAGKVDEALELFKEMRSKGVKPNVVTYTTLIDGLCKAGKVDEALELFKEMRSKGVKPNVVTYTTLIDGLCKAGKVDEALELFDEMKERGIKPDELTYNTLISGLGKAGRARDPPVLSSGSGGSGGGGHHHHHHGR

SEQ ID NO: 439 - protein, 869 aa, Artificial Sequence
  v3.1_PPR7
MAGVFTLEDFVGDWRQTAGYNLDQVLEQGGVSSLFQNLGVSVTPIQRIVLSGENGLKIDIHVIIPYEGLSGDQMGQIEKIFKVVYPVDDHHFKVILHYGTLVIDGVTPNMIDYFGRPYEGIAVFDGKKITVTGTLWNGNKIIDERLINPDGSLLFRVTINGVTGWRLCERILAGGGGSLVPRGSGGGGSSRLHMGNSVVTYNTLIDGLCKSGKIEEALKLFKEMEEKGITPSVVTYTTLIDGLCKAGKVDEALELFKEMRSKGVKPNVVTYNTLIDGLCKSGKIEEALKLFKEMEEKGITPSVVTYTTLIDGLCKAGKVDEALELFKEMRSKGVKPNVVTYTTLIDGLCKAGKVDEALELFKEMRSKGVKPNVVTYNTLIDGLCKAGRLDEAEELLEEMEEKGIKPDVVTYTTLIDGLCKAGKVDEALELFDEMKERGIKPDVVTYNTLIDGLCKAGRLDEAEELLEEMEEKGIKPDVVTYTTLIDGLCKAGKVDEALELFDEMKERGIKPDVVTYTTLIDGLCKAGKVDEALELFDEMKERGIKPDVVTYNTLIDGLCKSGKIEEALKLFKEMEEKGITPSVVTYNTLIDGLCKSGKIEEALKLFKEMEEKGITPSVVTYTTLIDGLCKAGKVDEALELFDEMKERGIKPDVVTYTTLIDGLCKAGKVDEALELFKEMRSKGVKPNVVTYTTLIDGLCKAGKVDEALELFDEMKERGIKPDVVTYTTLIDGLCKAGKVDEALELFDEMKERGIKPDVVTYTTLIDGLCKAGKVDEALELFKEMRSKGVKPNVVTYNTLIDGLCKSGKIEEALKLFKEMEEKGITPSELTYNTLISGLGKAGRARDPPVLSSGSGGSGGGGHHHHHHGR

SEQ ID NO: 440 - protein, 869 aa, Artificial Sequence
  v3.1_PPR8
MAGVFTLEDFVGDWRQTAGYNLDQVLEQGGVSSLFQNLGVSVTPIQRIVLSGENGLKIDIHVIIPYEGLSGDQMGQIEKIFKVVYPVDDHHFKVILHYGTLVIDGVTPNMIDYFGRPYEGIAVFDGKKITVTGTLWNGNKIIDERLINPDGSLLFRVTINGVTGWRLCERILAGGGGSLVPRGSGGGGSSRLHMGNSVVTYTTLIDGLCKAGKVDEALELFKEMRSKGVKPNVVTYTTLIDGLCKAGKVDEALELFKEMRSKGVKPNVVTYTTLIDGLCKAGKVDEALELFDEMKERGIKPDVVTYNTLIDGLCKSGKIEEALKLFKEMEEKGITPSVVTYNTLIDGLCKSGKIEEALKLFKEMEEKGITPSVVTYTTLIDGLCKAGKVDEALELFKEMRSKGVKPNVVTYTTLIDGLCKAGKVDEALELFDEMKERGIKPDVVTYNTLIDGLCKAGRLDEAEELLEEMEEKGIKPDVVTYNTLIDGLCKAGRLDEAEELLEEMEEKGIKPDVVTYNTLIDGLCKAGRLDEAEELLEEMEEKGIKPDVVTYNTLIDGLCKAGRLDEAEELLEEMEEKGIKPDVVTYNTLIDGLCKSGKIEEALKLFKEMEEKGITPSVVTYTTLIDGLCKAGKVDEALELFKEMRSKGVKPNVVTYNTLIDGLCKAGRLDEAEELLEEMEEKGIKPDVVTYNTLIDGLCKAGRLDEAEELLEEMEEKGIKPDVVTYNTLIDGLCKAGRLDEAEELLEEMEEKGIKPDVVTYNTLIDGLCKAGRLDEAEELLEEMEEKGIKPDVVTYTTLIDGLCKAGKVDEALELFDEMKERGIKPDELTYNTLISGLGKAGRARDPPVLSSGSGGSGGGGHHHHHHGR

SEQ ID NO: 441 - protein, 869 aa, Artificial Sequence
  v3.1_PPR9
MAGVFTLEDFVGDWRQTAGYNLDQVLEQGGVSSLFQNLGVSVTPIQRIVLSGENGLKIDIHVIIPYEGLSGDQMGQIEKIFKVVYPVDDHHFKVILHYGTLVIDGVTPNMIDYFGRPYEGIAVFDGKKITVTGTLWNGNKIIDERLINPDGSLLFRVTINGVTGWRLCERILAGGGGSLVPRGSGGGGSSRLHMGNSVVTYNTLIDGLCKSGKIEEALKLFKEMEEKGITPSVVTYTTLIDGLCKAGKVDEALELFKEMRSKGVKPNVVTYNTLIDGLCKSGKIEEALKLFKEMEEKGITPSVVTYNTLIDGLCKAGRLDEAEELLEEMEEKGIKPDVVTYTTLIDGLCKAGKVDEALELFKEMRSKGVKPNVVTYNTLIDGLCKAGRLDEAEELLEEMEEKGIKPDVVTYNTLIDGLCKAGRLDEAEELLEEMEEKGIKPDVVTYNTLIDGLCKAGRLDEAEELLEEMEEKGIKPDVVTYTTLIDGLCKAGKVDEALELFKEMRSKGVKPNVVTYTTLIDGLCKAGKVDEALELFKEMRSKGVKPNVVTYTTLIDGLCKAGKVDEALELFDEMKERGIKPDVVTYNTLIDGLCKAGRLDEAEELLEEMEEKGIKPDVVTYNTLIDGLCKAGRLDEAEELLEEMEEKGIKPDVVTYTTLIDGLCKAGKVDEALELFKEMRSKGVKPNVVTYNTLIDGLCKAGRLDEAEELLEEMEEKGIKPDVVTYNTLIDGLCKSGKIEEALKLFKEMEEKGITPSVVTYTTLIDGLCKAGKVDEALELFKEMRSKGVKPNVVTYTTLIDGLCKAGKVDEALELFKEMRSKGVKPNELTYNTLISGLGKAGRARDPPVLSSGSGGSGGGGHHHHHHGR

SEQ ID NO: 442 - protein, 869 aa, Artificial Sequence
  v3.1_PPR10
MAGVFTLEDFVGDWRQTAGYNLDQVLEQGGVSSLFQNLGVSVTPIQRIVLSGENGLKIDIHVIIPYEGLSGDQMGQIEKIFKVVYPVDDHHFKVILHYGTLVIDGVTPNMIDYFGRPYEGIAVFDGKKITVTGTLWNGNKIIDERLINPDGSLLFRVTINGVTGWRLCERILAGGGGSLVPRGSGGGGSSRLHMGNSVVTYNTLIDGLCKSGKIEEALKLFKEMEEKGITPSVVTYTTLIDGLCKAGKVDEALELFKEMRSKGVKPNVVTYTTLIDGLCKAGKVDEALELFKEMRSKGVKPNVVTYTTLIDGLCKAGKVDEALELFKEMRSKGVKPNVVTYNTLIDGLCKSGKIEEALKLFKEMEEKGITPSVVTYNTLIDGLCKAGRLDEAEELLEEMEEKGIKPDVVTYNTLIDGLCKAGRLDEAEELLEEMEEKGIKPDVVTYNTLIDGLCKAGRLDEAEELLEEMEEKGIKPDVVTYNTLIDGLCKSGKIEEALKLFKEMEEKGITPSVVTYTTLIDGLCKAGKVDEALELFKEMRSKGVKPNVVTYNTLIDGLCKSGKIEEALKLFKEMEEKGITPSVVTYNTLIDGLCKAGRLDEAEELLEEMEEKGIKPDVVTYNTLIDGLCKAGRLDEAEELLEEMEEKGIKPDVVTYNTLIDGLCKAGRLDEAEELLEEMEEKGIKPDVVTYTTLIDGLCKAGKVDEALELFDEMKERGIKPDVVTYTTLIDGLCKAGKVDEALELFKEMRSKGVKPNVVTYTTLIDGLCKAGKVDEALELFKEMRSKGVKPNVVTYTTLIDGLCKAGKVDEALELFKEMRSKGVKPNELTYNTLISGLGKAGRARDPPVLSSGSGGSGGGGHHHHHHGR

SEQ ID NO: 443 - protein, 869 aa, Artificial Sequence
  v3.1_PPR11
MAGVFTLEDFVGDWRQTAGYNLDQVLEQGGVSSLFQNLGVSVTPIQRIVLSGENGLKIDIHVIIPYEGLSGDQMGQIEKIFKVVYPVDDHHFKVILHYGTLVIDGVTPNMIDYFGRPYEGIAVFDGKKITVTGTLWNGNKIIDERLINPDGSLLFRVTINGVTGWRLCERILAGGGGSLVPRGSGGGGSSRLHMGNSVVTYTTLIDGLCKAGKVDEALELFDEMKERGIKPDVVTYTTLIDGLCKAGKVDEALELFDEMKERGIKPDVVTYNTLIDGLCKAGRLDEAEELLEEMEEKGIKPDVVTYTTLIDGLCKAGKVDEALELFDEMKERGIKPDVVTYTTLIDGLCKAGKVDEALELFDEMKERGIKPDVVTYNTLIDGLCKAGRLDEAEELLEEMEEKGIKPDVVTYTTLIDGLCKAGKVDEALELFDEMKERGIKPDVVTYTTLIDGLCKAGKVDEALELFKEMRSKGVKPNVVTYTTLIDGLCKAGKVDEALELFDEMKERGIKPDVVTYTTLIDGLCKAGKVDEALELFDEMKERGIKPDVVTYNTLIDGLCKSGKIEEALKLFKEMEEKGITPSVVTYNTLIDGLCKSGKIEEALKLFKEMEEKGITPSVVTYNTLIDGLCKSGKIEEALKLFKEMEEKGITPSVVTYNTLIDGLCKAGRLDEAEELLEEMEEKGIKPDVVTYTTLIDGLCKAGKVDEALELFDEMKERGIKPDVVTYTTLIDGLCKAGKVDEALELFDEMKERGIKPDVVTYTTLIDGLCKAGKVDEALELFDEMKERGIKPDVVTYNTLIDGLCKSGKIEEALKLFKEMEEKGITPSELTYNTLISGLGKAGRARDPPVLSSGSGGSGGGGHHHHHHGR

SEQ ID NO: 444 - protein, 869 aa, Artificial Sequence
  v3.1_PPR12
MAGVFTLEDFVGDWRQTAGYNLDQVLEQGGVSSLFQNLGVSVTPIQRIVLSGENGLKIDIHVIIPYEGLSGDQMGQIEKIFKVVYPVDDHHFKVILHYGTLVIDGVTPNMIDYFGRPYEGIAVFDGKKITVTGTLWNGNKIIDERLINPDGSLLFRVTINGVTGWRLCERILAGGGGSLVPRGSGGGGSSRLHMGNSVVTYTTLIDGLCKAGKVDEALELFDEMKERGIKPDVVTYTTLIDGLCKAGKVDEALELFKEMRSKGVKPNVVTYNTLIDGLCKSGKIEEALKLFKEMEEKGITPSVVTYNTLIDGLCKAGRLDEAEELLEEMEEKGIKPDVVTYNTLIDGLCKSGKIEEALKLFKEMEEKGITPSVVTYTTLIDGLCKAGKVDEALELFKEMRSKGVKPNVVTYTTLIDGLCKAGKVDEALELFDEMKERGIKPDVVTYTTLIDGLCKAGKVDEALELFDEMKERGIKPDVVTYTTLIDGLCKAGKVDEALELFKEMRSKGVKPNVVTYTTLIDGLCKAGKVDEALELFKEMRSKGVKPNVVTYNTLIDGLCKAGRLDEAEELLEEMEEKGIKPDVVTYNTLIDGLCKSGKIEEALKLFKEMEEKGITPSVVTYTTLIDGLCKAGKVDEALELFDEMKERGIKPDVVTYTTLIDGLCKAGKVDEALELFDEMKERGIKPDVVTYNTLIDGLCKSGKIEEALKLFKEMEEKGITPSVVTYNTLIDGLCKAGRLDEAEELLEEMEEKGIKPDVVTYNTLIDGLCKSGKIEEALKLFKEMEEKGITPSVVTYNTLIDGLCKAGRLDEAEELLEEMEEKGIKPDELTYNTLISGLGKAGRARDPPVLSSGSGGSGGGGHHHHHHGR

SEQ ID NO: 445 - protein, 869 aa, Artificial Sequence
  v3.1_PPR13
MAGVFTLEDFVGDWRQTAGYNLDQVLEQGGVSSLFQNLGVSVTPIQRIVLSGENGLKIDIHVIIPYEGLSGDQMGQIEKIFKVVYPVDDHHFKVILHYGTLVIDGVTPNMIDYFGRPYEGIAVFDGKKITVTGTLWNGNKIIDERLINPDGSLLFRVTINGVTGWRLCERILAGGGGSLVPRGSGGGGSSRLHMGNSVVTYNTLIDGLCKSGKIEEALKLFKEMEEKGITPSVVTYTTLIDGLCKAGKVDEALELFKEMRSKGVKPNVVTYTTLIDGLCKAGKVDEALELFKEMRSKGVKPNVVTYNTLIDGLCKSGKIEEALKLFKEMEEKGITPSVVTYTTLIDGLCKAGKVDEALELFKEMRSKGVKPNVVTYNTLIDGLCKAGRLDEAEELLEEMEEKGIKPDVVTYNTLIDGLCKSGKIEEALKLFKEMEEKGITPSVVTYTTLIDGLCKAGKVDEALELFKEMRSKGVKPNVVTYTTLIDGLCKAGKVDEALELFKEMRSKGVKPNVVTYTTLIDGLCKAGKVDEALELFKEMRSKGVKPNVVTYTTLIDGLCKAGKVDEALELFDEMKERGIKPDVVTYTTLIDGLCKAGKVDEALELFKEMRSKGVKPNVVTYNTLIDGLCKSGKIEEALKLFKEMEEKGITPSVVTYTTLIDGLCKAGKVDEALELFKEMRSKGVKPNVVTYNTLIDGLCKSGKIEEALKLFKEMEEKGITPSVVTYNTLIDGLCKSGKIEEALKLFKEMEEKGITPSVVTYTTLIDGLCKAGKVDEALELFKEMRSKGVKPNVVTYNTLIDGLCKAGRLDEAEELLEEMEEKGIKPDELTYNTLISGLGKAGRARDPPVLSSGSGGSGGGGHHHHHHGR

SEQ ID NO: 446 - protein, 869 aa, Artificial Sequence
  v3.1_PPR14
MAGVFTLEDFVGDWRQTAGYNLDQVLEQGGVSSLFQNLGVSVTPIQRIVLSGENGLKIDIHVIIPYEGLSGDQMGQIEKIFKVVYPVDDHHFKVILHYGTLVIDGVTPNMIDYFGRPYEGIAVFDGKKITVTGTLWNGNKIIDERLINPDGSLLFRVTINGVTGWRLCERILAGGGGSLVPRGSGGGGSSRLHMGNSVVTYTTLIDGLCKAGKVDEALELFDEMKERGIKPDVVTYNTLIDGLCKAGRLDEAEELLEEMEEKGIKPDVVTYNTLIDGLCKSGKIEEALKLFKEMEEKGITPSVVTYTTLIDGLCKAGKVDEALELFKEMRSKGVKPNVVTYTTLIDGLCKAGKVDEALELFDEMKERGIKPDVVTYTTLIDGLCKAGKVDEALELFKEMRSKGVKPNVVTYTTLIDGLCKAGKVDEALELFDEMKERGIKPDVVTYTTLIDGLCKAGKVDEALELFDEMKERGIKPDVVTYTTLIDGLCKAGKVDEALELFDEMKERGIKPDVVTYNTLIDGLCKAGRLDEAEELLEEMEEKGIKPDVVTYNTLIDGLCKAGRLDEAEELLEEMEEKGIKPDVVTYNTLIDGLCKSGKIEEALKLFKEMEEKGITPSVVTYNTLIDGLCKAGRLDEAEELLEEMEEKGIKPDVVTYTTLIDGLCKAGKVDEALELFDEMKERGIKPDVVTYTTLIDGLCKAGKVDEALELFDEMKERGIKPDVVTYTTLIDGLCKAGKVDEALELFKEMRSKGVKPNVVTYNTLIDGLCKAGRLDEAEELLEEMEEKGIKPDVVTYNTLIDGLCKAGRLDEAEELLEEMEEKGIKPDELTYNTLISGLGKAGRARDPPVLSSGSGGSGGGGHHHHHHGR

SEQ ID NO: 447 - protein, 869 aa, Artificial Sequence
  v3.1_PPR15
MAGVFTLEDFVGDWRQTAGYNLDQVLEQGGVSSLFQNLGVSVTPIQRIVLSGENGLKIDIHVIIPYEGLSGDQMGQIEKIFKVVYPVDDHHFKVILHYGTLVIDGVTPNMIDYFGRPYEGIAVFDGKKITVTGTLWNGNKIIDERLINPDGSLLFRVTINGVTGWRLCERILAGGGGSLVPRGSGGGGSSRLHMGNSVVTYTTLIDGLCKAGKVDEALELFDEMKERGIKPDVVTYNTLIDGLCKSGKIEEALKLFKEMEEKGITPSVVTYTTLIDGLCKAGKVDEALELFKEMRSKGVKPNVVTYTTLIDGLCKAGKVDEALELFDEMKERGIKPDVVTYTTLIDGLCKAGKVDEALELFKEMRSKGVKPNVVTYNTLIDGLCKAGRLDEAEELLEEMEEKGIKPDVVTYTTLIDGLCKAGKVDEALELFKEMRSKGVKPNVVTYTTLIDGLCKAGKVDEALELFKEMRSKGVKPNVVTYNTLIDGLCKAGRLDEAEELLEEMEEKGIKPDVVTYNTLIDGLCKAGRLDEAEELLEEMEEKGIKPDVVTYTTLIDGLCKAGKVDEALELFKEMRSKGVKPNVVTYTTLIDGLCKAGKVDEALELFKEMRSKGVKPNVVTYNTLIDGLCKAGRLDEAEELLEEMEEKGIKPDVVTYTTLIDGLCKAGKVDEALELFKEMRSKGVKPNVVTYTTLIDGLCKAGKVDEALELFKEMRSKGVKPNVVTYTTLIDGLCKAGKVDEALELFDEMKERGIKPDVVTYTTLIDGLCKAGKVDEALELFKEMRSKGVKPNVVTYTTLIDGLCKAGKVDEALELFKEMRSKGVKPNELTYNTLISGLGKAGRARDPPVLSSGSGGSGGGGHHHHHHGR

SEQ ID NO: 448 - protein, 869 aa, Artificial Sequence
  v3.1_PPR16
MAGVFTLEDFVGDWRQTAGYNLDQVLEQGGVSSLFQNLGVSVTPIQRIVLSGENGLKIDIHVIIPYEGLSGDQMGQIEKIFKVVYPVDDHHFKVILHYGTLVIDGVTPNMIDYFGRPYEGIAVFDGKKITVTGTLWNGNKIIDERLINPDGSLLFRVTINGVTGWRLCERILAGGGGSLVPRGSGGGGSSRLHMGNSVVTYTTLIDGLCKAGKVDEALELFKEMRSKGVKPNVVTYTTLIDGLCKAGKVDEALELFKEMRSKGVKPNVVTYTTLIDGLCKAGKVDEALELFDEMKERGIKPDVVTYTTLIDGLCKAGKVDEALELFDEMKERGIKPDVVTYTTLIDGLCKAGKVDEALELFKEMRSKGVKPNVVTYNTLIDGLCKAGRLDEAEELLEEMEEKGIKPDVVTYTTLIDGLCKAGKVDEALELFKEMRSKGVKPNVVTYTTLIDGLCKAGKVDEALELFKEMRSKGVKPNVVTYNTLIDGLCKAGRLDEAEELLEEMEEKGIKPDVVTYTTLIDGLCKAGKVDEALELFKEMRSKGVKPNVVTYNTLIDGLCKAGRLDEAEELLEEMEEKGIKPDVVTYNTLIDGLCKSGKIEEALKLFKEMEEKGITPSVVTYTTLIDGLCKAGKVDEALELFKEMRSKGVKPNVVTYTTLIDGLCKAGKVDEALELFKEMRSKGVKPNVVTYTTLIDGLCKAGKVDEALELFKEMRSKGVKPNVVTYNTLIDGLCKSGKIEEALKLFKEMEEKGITPSVVTYTTLIDGLCKAGKVDEALELFKEMRSKGVKPNVVTYNTLIDGLCKSGKIEEALKLFKEMEEKGITPSELTYNTLISGLGKAGRARDPPVLSSGSGGSGGGGHHHHHHGR

SEQ ID NO: 449 - protein, 869 aa, Artificial Sequence
  v3.1_PPR17
MAGVFTLEDFVGDWRQTAGYNLDQVLEQGGVSSLFQNLGVSVTPIQRIVLSGENGLKIDIHVIIPYEGLSGDQMGQIEKIFKVVYPVDDHHFKVILHYGTLVIDGVTPNMIDYFGRPYEGIAVFDGKKITVTGTLWNGNKIIDERLINPDGSLLFRVTINGVTGWRLCERILAGGGGSLVPRGSGGGGSSRLHMGNSVVTYNTLIDGLCKAGRLDEAEELLEEMEEKGIKPDVVTYNTLIDGLCKAGRLDEAEELLEEMEEKGIKPDVVTYTTLIDGLCKAGKVDEALELFKEMRSKGVKPNVVTYNTLIDGLCKAGRLDEAEELLEEMEEKGIKPDVVTYNTLIDGLCKSGKIEEALKLFKEMEEKGITPSVVTYTTLIDGLCKAGKVDEALELFKEMRSKGVKPNVVTYTTLIDGLCKAGKVDEALELFDEMKERGIKPDVVTYTTLIDGLCKAGKVDEALELFKEMRSKGVKPNVVTYNTLIDGLCKSGKIEEALKLFKEMEEKGITPSVVTYNTLIDGLCKAGRLDEAEELLEEMEEKGIKPDVVTYTTLIDGLCKAGKVDEALELFDEMKERGIKPDVVTYTTLIDGLCKAGKVDEALELFKEMRSKGVKPNVVTYNTLIDGLCKAGRLDEAEELLEEMEEKGIKPDVVTYTTLIDGLCKAGKVDEALELFDEMKERGIKPDVVTYNTLIDGLCKAGRLDEAEELLEEMEEKGIKPDVVTYNTLIDGLCKAGRLDEAEELLEEMEEKGIKPDVVTYTTLIDGLCKAGKVDEALELFDEMKERGIKPDVVTYTTLIDGLCKAGKVDEALELFKEMRSKGVKPNELTYNTLISGLGKAGRARDPPVLSSGSGGSGGGGHHHHHHGR

SEQ ID NO: 450 - protein, 869 aa, Artificial Sequence
  v3.1_PPR18
MAGVFTLEDFVGDWRQTAGYNLDQVLEQGGVSSLFQNLGVSVTPIQRIVLSGENGLKIDIHVIIPYEGLSGDQMGQIEKIFKVVYPVDDHHFKVILHYGTLVIDGVTPNMIDYFGRPYEGIAVFDGKKITVTGTLWNGNKIIDERLINPDGSLLFRVTINGVTGWRLCERILAGGGGSLVPRGSGGGGSSRLHMGNSVVTYTTLIDGLCKAGKVDEALELFDEMKERGIKPDVVTYTTLIDGLCKAGKVDEALELFDEMKERGIKPDVVTYNTLIDGLCKAGRLDEAEELLEEMEEKGIKPDVVTYNTLIDGLCKAGRLDEAEELLEEMEEKGIKPDVVTYTTLIDGLCKAGKVDEALELFKEMRSKGVKPNVVTYTTLIDGLCKAGKVDEALELFDEMKERGIKPDVVTYTTLIDGLCKAGKVDEALELFKEMRSKGVKPNVVTYTTLIDGLCKAGKVDEALELFDEMKERGIKPDVVTYTTLIDGLCKAGKVDEALELFKEMRSKGVKPNVVTYNTLIDGLCKAGRLDEAEELLEEMEEKGIKPDVVTYTTLIDGLCKAGKVDEALELFKEMRSKGVKPNVVTYNTLIDGLCKSGKIEEALKLFKEMEEKGITPSVVTYTTLIDGLCKAGKVDEALELFKEMRSKGVKPNVVTYTTLIDGLCKAGKVDEALELFDEMKERGIKPDVVTYNTLIDGLCKAGRLDEAEELLEEMEEKGIKPDVVTYTTLIDGLCKAGKVDEALELFDEMKERGIKPDVVTYNTLIDGLCKAGRLDEAEELLEEMEEKGIKPDVVTYTTLIDGLCKAGKVDEALELFDEMKERGIKPDELTYNTLISGLGKAGRARDPPVLSSGSGGSGGGGHHHHHHGR

SEQ ID NO: 451 - protein, 869 aa, Artificial Sequence
  v3.1_PPR19
MAGVFTLEDFVGDWRQTAGYNLDQVLEQGGVSSLFQNLGVSVTPIQRIVLSGENGLKIDIHVIIPYEGLSGDQMGQIEKIFKVVYPVDDHHFKVILHYGTLVIDGVTPNMIDYFGRPYEGIAVFDGKKITVTGTLWNGNKIIDERLINPDGSLLFRVTINGVTGWRLCERILAGGGGSLVPRGSGGGGSSRLHMGNSVVTYTTLIDGLCKAGKVDEALELFDEMKERGIKPDVVTYNTLIDGLCKAGRLDEAEELLEEMEEKGIKPDVVTYTTLIDGLCKAGKVDEALELFDEMKERGIKPDVVTYTTLIDGLCKAGKVDEALELFDEMKERGIKPDVVTYTTLIDGLCKAGKVDEALELFDEMKERGIKPDVVTYTTLIDGLCKAGKVDEALELFDEMKERGIKPDVVTYTTLIDGLCKAGKVDEALELFDEMKERGIKPDVVTYNTLIDGLCKAGRLDEAEELLEEMEEKGIKPDVVTYTTLIDGLCKAGKVDEALELFDEMKERGIKPDVVTYTTLIDGLCKAGKVDEALELFDEMKERGIKPDVVTYNTLIDGLCKAGRLDEAEELLEEMEEKGIKPDVVTYTTLIDGLCKAGKVDEALELFKEMRSKGVKPNVVTYTTLIDGLCKAGKVDEALELFDEMKERGIKPDVVTYTTLIDGLCKAGKVDEALELFDEMKERGIKPDVVTYTTLIDGLCKAGKVDEALELFKEMRSKGVKPNVVTYTTLIDGLCKAGKVDEALELFKEMRSKGVKPNVVTYTTLIDGLCKAGKVDEALELFKEMRSKGVKPNVVTYNTLIDGLCKAGRLDEAEELLEEMEEKGIKPDELTYNTLISGLGKAGRARDPPVLSSGSGGSGGGGHHHHHHGR

SEQ ID NO: 452 - protein, 869 aa, Artificial Sequence
  v3.1_PPR20
MAGVFTLEDFVGDWRQTAGYNLDQVLEQGGVSSLFQNLGVSVTPIQRIVLSGENGLKIDIHVIIPYEGLSGDQMGQIEKIFKVVYPVDDHHFKVILHYGTLVIDGVTPNMIDYFGRPYEGIAVFDGKKITVTGTLWNGNKIIDERLINPDGSLLFRVTINGVTGWRLCERILAGGGGSLVPRGSGGGGSSRLHMGNSVVTYTTLIDGLCKAGKVDEALELFDEMKERGIKPDVVTYNTLIDGLCKAGRLDEAEELLEEMEEKGIKPDVVTYTTLIDGLCKAGKVDEALELFDEMKERGIKPDVVTYTTLIDGLCKAGKVDEALELFKEMRSKGVKPNVVTYNTLIDGLCKAGRLDEAEELLEEMEEKGIKPDVVTYTTLIDGLCKAGKVDEALELFDEMKERGIKPDVVTYNTLIDGLCKAGRLDEAEELLEEMEEKGIKPDVVTYTTLIDGLCKAGKVDEALELFDEMKERGIKPDVVTYTTLIDGLCKAGKVDEALELFDEMKERGIKPDVVTYTTLIDGLCKAGKVDEALELFKEMRSKGVKPNVVTYTTLIDGLCKAGKVDEALELFDEMKERGIKPDVVTYNTLIDGLCKAGRLDEAEELLEEMEEKGIKPDVVTYNTLIDGLCKAGRLDEAEELLEEMEEKGIKPDVVTYTTLIDGLCKAGKVDEALELFKEMRSKGVKPNVVTYTTLIDGLCKAGKVDEALELFKEMRSKGVKPNVVTYTTLIDGLCKAGKVDEALELFDEMKERGIKPDVVTYTTLIDGLCKAGKVDEALELFDEMKERGIKPDVVTYNTLIDGLCKSGKIEEALKLFKEMEEKGITPSELTYNTLISGLGKAGRARDPPVLSSGSGGSGGGGHHHHHHGR

SEQ ID NO: 453 - protein, 869 aa, Artificial Sequence
  v3.1_PPR21
MAGVFTLEDFVGDWRQTAGYNLDQVLEQGGVSSLFQNLGVSVTPIQRIVLSGENGLKIDIHVIIPYEGLSGDQMGQIEKIFKVVYPVDDHHFKVILHYGTLVIDGVTPNMIDYFGRPYEGIAVFDGKKITVTGTLWNGNKIIDERLINPDGSLLFRVTINGVTGWRLCERILAGGGGSLVPRGSGGGGSSRLHMGNSVVTYTTLIDGLCKAGKVDEALELFDEMKERGIKPDVVTYTTLIDGLCKAGKVDEALELFDEMKERGIKPDVVTYTTLIDGLCKAGKVDEALELFKEMRSKGVKPNVVTYTTLIDGLCKAGKVDEALELFKEMRSKGVKPNVVTYTTLIDGLCKAGKVDEALELFDEMKERGIKPDVVTYTTLIDGLCKAGKVDEALELFKEMRSKGVKPNVVTYTTLIDGLCKAGKVDEALELFDEMKERGIKPDVVTYNTLIDGLCKAGRLDEAEELLEEMEEKGIKPDVVTYTTLIDGLCKAGKVDEALELFDEMKERGIKPDVVTYNTLIDGLCKAGRLDEAEELLEEMEEKGIKPDVVTYNTLIDGLCKSGKIEEALKLFKEMEEKGITPSVVTYNTLIDGLCKAGRLDEAEELLEEMEEKGIKPDVVTYTTLIDGLCKAGKVDEALELFDEMKERGIKPDVVTYTTLIDGLCKAGKVDEALELFDEMKERGIKPDVVTYTTLIDGLCKAGKVDEALELFKEMRSKGVKPNVVTYTTLIDGLCKAGKVDEALELFDEMKERGIKPDVVTYNTLIDGLCKSGKIEEALKLFKEMEEKGITPSVVTYTTLIDGLCKAGKVDEALELFKEMRSKGVKPNELTYNTLISGLGKAGRARDPPVLSSGSGGSGGGGHHHHHHGR

SEQ ID NO: 454 - protein, 869 aa, Artificial Sequence
  v3.1_PPR22
MAGVFTLEDFVGDWRQTAGYNLDQVLEQGGVSSLFQNLGVSVTPIQRIVLSGENGLKIDIHVIIPYEGLSGDQMGQIEKIFKVVYPVDDHHFKVILHYGTLVIDGVTPNMIDYFGRPYEGIAVFDGKKITVTGTLWNGNKIIDERLINPDGSLLFRVTINGVTGWRLCERILAGGGGSLVPRGSGGGGSSRLHMGNSVVTYNTLIDGLCKAGRLDEAEELLEEMEEKGIKPDVVTYTTLIDGLCKAGKVDEALELFDEMKERGIKPDVVTYTTLIDGLCKAGKVDEALELFKEMRSKGVKPNVVTYNTLIDGLCKAGRLDEAEELLEEMEEKGIKPDVVTYTTLIDGLCKAGKVDEALELFDEMKERGIKPDVVTYTTLIDGLCKAGKVDEALELFKEMRSKGVKPNVVTYNTLIDGLCKAGRLDEAEELLEEMEEKGIKPDVVTYTTLIDGLCKAGKVDEALELFDEMKERGIKPDVVTYTTLIDGLCKAGKVDEALELFKEMRSKGVKPNVVTYNTLIDGLCKAGRLDEAEELLEEMEEKGIKPDVVTYTTLIDGLCKAGKVDEALELFDEMKERGIKPDVVTYTTLIDGLCKAGKVDEALELFKEMRSKGVKPNVVTYNTLIDGLCKAGRLDEAEELLEEMEEKGIKPDVVTYTTLIDGLCKAGKVDEALELFDEMKERGIKPDVVTYTTLIDGLCKAGKVDEALELFKEMRSKGVKPNVVTYNTLIDGLCKAGRLDEAEELLEEMEEKGIKPDVVTYTTLIDGLCKAGKVDEALELFDEMKERGIKPDVVTYTTLIDGLCKAGKVDEALELFKEMRSKGVKPNELTYNTLISGLGKAGRARDPPVLSSGSGGSGGGGHHHHHHGR

SEQ ID NO: 455 - protein, 869 aa, Artificial Sequence
  v3.1_PPR23
MAGVFTLEDFVGDWRQTAGYNLDQVLEQGGVSSLFQNLGVSVTPIQRIVLSGENGLKIDIHVIIPYEGLSGDQMGQIEKIFKVVYPVDDHHFKVILHYGTLVIDGVTPNMIDYFGRPYEGIAVFDGKKITVTGTLWNGNKIIDERLINPDGSLLFRVTINGVTGWRLCERILAGGGGSLVPRGSGGGGSSRLHMGNSVVTYNTLIDGLCKAGRLDEAEELLEEMEEKGIKPDVVTYNTLIDGLCKSGKIEEALKLFKEMEEKGITPSVVTYNTLIDGLCKAGRLDEAEELLEEMEEKGIKPDVVTYNTLIDGLCKAGRLDEAEELLEEMEEKGIKPDVVTYNTLIDGLCKAGRLDEAEELLEEMEEKGIKPDVVTYTTLIDGLCKAGKVDEALELFDEMKERGIKPDVVTYNTLIDGLCKSGKIEEALKLFKEMEEKGITPSVVTYNTLIDGLCKSGKIEEALKLFKEMEEKGITPSVVTYTTLIDGLCKAGKVDEALELFKEMRSKGVKPNVVTYNTLIDGLCKAGRLDEAEELLEEMEEKGIKPDVVTYNTLIDGLCKAGRLDEAEELLEEMEEKGIKPDVVTYNTLIDGLCKAGRLDEAEELLEEMEEKGIKPDVVTYNTLIDGLCKSGKIEEALKLFKEMEEKGITPSVVTYNTLIDGLCKSGKIEEALKLFKEMEEKGITPSVVTYNTLIDGLCKSGKIEEALKLFKEMEEKGITPSVVTYTTLIDGLCKAGKVDEALELFKEMRSKGVKPNVVTYNTLIDGLCKAGRLDEAEELLEEMEEKGIKPDVVTYTTLIDGLCKAGKVDEALELFKEMRSKGVKPNELTYNTLISGLGKAGRARDPPVLSSGSGGSGGGGHHHHHHGR

SEQ ID NO: 456 - protein, 869 aa, Artificial Sequence
  v3.1_PPR24
MAGVFTLEDFVGDWRQTAGYNLDQVLEQGGVSSLFQNLGVSVTPIQRIVLSGENGLKIDIHVIIPYEGLSGDQMGQIEKIFKVVYPVDDHHFKVILHYGTLVIDGVTPNMIDYFGRPYEGIAVFDGKKITVTGTLWNGNKIIDERLINPDGSLLFRVTINGVTGWRLCERILAGGGGSLVPRGSGGGGSSRLHMGNSVVTYNTLIDGLCKSGKIEEALKLFKEMEEKGITPSVVTYNTLIDGLCKSGKIEEALKLFKEMEEKGITPSVVTYNTLIDGLCKSGKIEEALKLFKEMEEKGITPSVVTYTTLIDGLCKAGKVDEALELFKEMRSKGVKPNVVTYNTLIDGLCKAGRLDEAEELLEEMEEKGIKPDVVTYTTLIDGLCKAGKVDEALELFKEMRSKGVKPNVVTYTTLIDGLCKAGKVDEALELFDEMKERGIKPDVVTYTTLIDGLCKAGKVDEALELFKEMRSKGVKPNVVTYNTLIDGLCKAGRLDEAEELLEEMEEKGIKPDVVTYTTLIDGLCKAGKVDEALELFDEMKERGIKPDVVTYNTLIDGLCKAGRLDEAEELLEEMEEKGIKPDVVTYTTLIDGLCKAGKVDEALELFDEMKERGIKPDVVTYTTLIDGLCKAGKVDEALELFKEMRSKGVKPNVVTYNTLIDGLCKSGKIEEALKLFKEMEEKGITPSVVTYTTLIDGLCKAGKVDEALELFKEMRSKGVKPNVVTYTTLIDGLCKAGKVDEALELFKEMRSKGVKPNVVTYTTLIDGLCKAGKVDEALELFDEMKERGIKPDVVTYNTLIDGLCKSGKIEEALKLFKEMEEKGITPSELTYNTLISGLGKAGRARDPPVLSSGSGGSGGGGHHHHHHGR

SEQ ID NO: 457 - DNA, 2271 bp, Artificial Sequence
  v2_polypucleotide
atgggtcatcaccatcatcatcacgggtccctgcaggactcagaagtcaatcaagaagctaagccagaggtcaagccagaagtcaagcctgagactcacatcaatttaaaggtgtccgatggatcttcagagatcttcttcaagatcaaaaagaccactcctttaagaaggctgatggaagcgttcgctaaaagacagggtaaggaaatggactccttaagattcttgtacgacggtattagaattcaagctgatcaggcccctgaagatttggacatggaggataacgatattattgaggctcaccgcgaacagattggaggtatgggaaactccgtggtcacatacaacaccctgatcgacggcctgtgcaagagcggcaagatcgaggaggccctgaagctgttcaaggagatggaggagaagggcatcacccccagcgtggtcacatacaccacactgatcgacggactgtgtaaagccggcgacgtggacgaagccctcgagctgttcaaagagatgcggagcaagggcgtgaagcccaacgtggtgacatacaccaccctgatcgacggcctgtgcaaggccggcaaagtggacgaggccctggagctgttcgacgagatgaaggagaggggcatcaagcccgacgtggtcacatacaacaccctgatcgacggcctgtgcaagagcggcaagatcgaggaggccctgaagctgttcaaggagatggaggagaagggcatcacccccagcgtggttacatacaccacactgatcgacggactgtgtaaagccggcgacgtggacgaagccctcgagctgttcaaagagatgcggagcaagggcgtgaagcccaacgtggtcacatacaccaccctgatcgacggcctgtgcaaggccggcaaggtggatgaggccctggagctgttcgacgagatgaaggagaggggcatcaagcccgacgtggttacatacaacaccctgatcgacggcctgtgcaagagcggcaagatcgaggaggccctgaagctgttcaaggagatggaggagaagggcatcacccccagcgtggtcacatacaccacactgatcgacggactgtgtaaagccggcgacgtggacgaagccctcgagctgttcaaagagatgcggagcaagggcgtgaagcccaacgtggtgacatacaccaccctgatcgacggcctgtgcaaggccggcaaagtggacgaggccctggagctgttcgacgagatgaaggagaggggcatcaagcccgacgtggtcacatacaacaccctgatcgacggcctgtgcaagagcggcaagatcgaggaggccctgaagctgttcaaggagatggaggagaagggcatcacccccagcgtggttacatacaccacactgatcgacggactgtgtaaagccggcgacgtggacgaagccctcgagctgttcaaagagatgcggagcaagggcgtgaagcccaacgtggtcacatacaccaccctgatcgacggcctgtgcaaggccggcaaggtggatgaggccctggagctgttcgacgagatgaaggagaggggcatcaagcccgacgtggtcacatacaacaccctgatcgacggcctgtgcaagagcggcaagatcgaggaggccctgaagctgttcaaggagatggaggagaagggcatcacccccagcgtggtcacatacaccacactgatcgacggactgtgtaaagccggcgacgtggacgaagccctcgagctgttcaaagagatgcggagcaagggcgtgaagcccaacgtggttacatacaccaccctgatcgacggcctgtgcaaggccggcaaagtggacgaggccctggagctgttcgacgagatgaaggagaggggcatcaagcccgacgtggtcacatacaacaccctgatcgacggcctgtgcaagagcggcaagatcgaggaggccctgaagctgttcaaggagatggaggagaagggcatcacccccagcgtggtgacatacaccacactgatcgacggactgtgtaaagccggcgacgtggacgaagccctcgagctgttcaaagagatgcggagcaagggcgtgaagcccaacgtggtcacatacaccaccctgatcgacggcctgtgcaaggccggcaaggtggatgaggccctggagctgttcgacgagatgaaggagaggggcatcaagcccgacgagctgacctacaacaccctgatcagcggcctgggcaaggccggc

SEQ ID NO: 458 - protein, 757 aa, Artificial Sequence
  v2_protein
MGHHHHHHGSLQDSEVNQEAKPEVKPEVKPETHINLKVSDGSSEIFFKIKKTTPLRRLMEAFAKRQGKEMDSLRFLYDGIRIQADQAPEDLDMEDNDIIEAHREQIGGMGNSVVTYNTLIDGLCKSGKIEEALKLFKEMEEKGITPSVVTYTTLIDGLCKAGDVDEALELFKEMRSKGVKPNVVTYTTLIDGLCKAGKVDEALELFDEMKERGIKPDVVTYNTLIDGLCKSGKIEEALKLFKEMEEKGITPSVVTYTTLIDGLCKAGDVDEALELFKEMRSKGVKPNVVTYTTLIDGLCKAGKVDEALELFDEMKERGIKPDVVTYNTLIDGLCKSGKIEEALKLFKEMEEKGITPSVVTYTTLIDGLCKAGDVDEALELFKEMRSKGVKPNVVTYTTLIDGLCKAGKVDEALELFDEMKERGIKPDVVTYNTLIDGLCKSGKIEEALKLFKEMEEKGITPSVVTYTTLIDGLCKAGDVDEALELFKEMRSKGVKPNVVTYTTLIDGLCKAGKVDEALELFDEMKERGIKPDVVTYNTLIDGLCKSGKIEEALKLFKEMEEKGITPSVVTYTTLIDGLCKAGDVDEALELFKEMRSKGVKPNVVTYTTLIDGLCKAGKVDEALELFDEMKERGIKPDVVTYNTLIDGLCKSGKIEEALKLFKEMEEKGITPSVVTYTTLIDGLCKAGDVDEALELFKEMRSKGVKPNVVTYTTLIDGLCKAGKVDEALELFDEMKERGIKPDELTYNTLISGLGKAG

SEQ ID NO: 459 - DNA, 2274 bp, Artificial Sequence
  v3.2_polypucleotide
atgggtcatcaccatcatcatcacgggtccctgcaggactcagaagtcaatcaagaagctaagccagaggtcaagccagaagtcaagcctgagactcacatcaatttaaaggtgtccgatggatcttcagagatcttcttcaagatcaaaaagaccactcctttaagaaggctgatggaagcgttcgctaaaagacagggtaaggaaatggactccttaagattcttgtacgacggtattagaattcaagctgatcaggcccctgaagatttggacatggaggataacgatattattgaggctcaccgcgaacagattggaggtatgggaaactccgtggtcacatacaacaccaacatcgaccagctgtgcaagagcggcaagatcgaggaggccctgaagctgttcaaggagatggaggagaagggcatcacccccagcgtggtcacatacaccacactgatcgacggactgtgtaaagccggcgacgtggacgaagccctcgagctgttcaaagagatgcggagcaagggcgtgaagcccaacgtggtgacatacaccaccctgatcgacggcctgtgcaaggccggcaaagtggacgaggccctggagctgttcgacgagatgaaggagaggggcatcaagcccgacgtggtcacatacaacaccctgatcgacggcctgtgcaagagcggcaagatcgaggaggccctgaagctgttcaaggagatggaggagaagggcatcacccccagcgtggttacatacaccacactgatcgacggactgtgtaaagccggcgacgtggacgaagccctcgagctgttcaaagagatgcggagcaagggcgtgaagcccaacgtggtcacatacaccaccctgatcgacggcctgtgcaaggccggcaaggtggatgaggccctggagctgttcgacgagatgaaggagaggggcatcaagcccgacgtggttacatacaacaccctgatcgacggcctgtgcaagagcggcaagatcgaggaggccctgaagctgttcaaggagatggaggagaagggcatcacccccagcgtggtcacatacaccacactgatcgacggactgtgtaaagccggcgacgtggacgaagccctcgagctgttcaaagagatgcggagcaagggcgtgaagcccaacgtggtgacatacaccaccctgatcgacggcctgtgcaaggccggcaaagtggacgaggccctggagctgttcgacgagatgaaggagaggggcatcaagcccgacgtggtcacatacaacaccctgatcgacggcctgtgcaagagcggcaagatcgaggaggccctgaagctgttcaaggagatggaggagaagggcatcacccccagcgtggttacatacaccacactgatcgacggactgtgtaaagccggcgacgtggacgaagccctcgagctgttcaaagagatgcggagcaagggcgtgaagcccaacgtggtcacatacaccaccctgatcgacggcctgtgcaaggccggcaaggtggatgaggccctggagctgttcgacgagatgaaggagaggggcatcaagcccgacgtggtcacatacaacaccctgatcgacggcctgtgcaagagcggcaagatcgaggaggccctgaagctgttcaaggagatggaggagaagggcatcacccccagcgtggtcacatacaccacactgatcgacggactgtgtaaagccggcgacgtggacgaagccctcgagctgttcaaagagatgcggagcaagggcgtgaagcccaacgtggttacatacaccaccctgatcgacggcctgtgcaaggccggcaaagtggacgaggccctggagctgttcgacgagatgaaggagaggggcatcaagcccgacgtggtcacatacaacaccctgatcgacggcctgtgcaagagcggcaagatcgaggaggccctgaagctgttcaaggagatggaggagaagggcatcacccccagcgtggtgacatacaccacactgatcgacggactgtgtaaagccggcgacgtggacgaagccctcgagctgttcaaagagatgcggagcaagggcgtgaagcccaacgtggtcacatacaccaccctgatcgacggcctgtgcaaggccggcaaggtggatgaggccctggagctgttcgacgagatgaaggagaggggcatcaagcccgacgaggagctgacctacaacaccctgatcagcggcctgggcaaggccggc

SEQ ID NO: 460 - protein, 757 aa, Artificial Sequence
  v3.2_protein
MGHHHHHHGSLQDSEVNQEAKPEVKPEVKPETHINLKVSDGSSEIFFKIKKTTPLRRLMEAFAKRQGKEMDSLRFLYDGIRIQADQAPEDLDMEDNDIIEAHREQIGGMGNSVVTYNTNIDQLCKSGKIEEALKLFKEMEEKGITPSVVTYTTLIDGLCKAGDVDEALELFKEMRSKGVKPNVVTYTTLIDGLCKAGKVDEALELFDEMKERGIKPDVVTYNTLIDGLCKSGKIEEALKLFKEMEEKGITPSVVTYTTLIDGLCKAGDVDEALELFKEMRSKGVKPNVVTYTTLIDGLCKAGKVDEALELFDEMKERGIKPDVVTYNTLIDGLCKSGKIEEALKLFKEMEEKGITPSVVTYTTLIDGLCKAGDVDEALELFKEMRSKGVKPNVVTYTTLIDGLCKAGKVDEALELFDEMKERGIKPDVVTYNTLIDGLCKSGKIEEALKLFKEMEEKGITPSVVTYTTLIDGLCKAGDVDEALELFKEMRSKGVKPNVVTYTTLIDGLCKAGKVDEALELFDEMKERGIKPDVVTYNTLIDGLCKSGKIEEALKLFKEMEEKGITPSVVTYTTLIDGLCKAGDVDEALELFKEMRSKGVKPNVVTYTTLIDGLCKAGKVDEALELFDEMKERGIKPDVVTYNTLIDGLCKSGKIEEALKLFKEMEEKGITPSVVTYTTLIDGLCKAGDVDEALELFKEMRSKGVKPNVVTYTTLIDGLCKAGKVDEALELFDEMKERGIKPDELTYNTLISGLGKAG
